United States Patent Application Publication US 2022/0211063 A1 - sequence listing, part 28

SEQ ID NO: 60 - DNA, 1380114 bp, Penicillium roqueforti
  misc_feature (15000)..(15662): n is a, c, g, or t
  misc_feature (17771)..(18557): n is a, c, g, or t
  misc_feature (101010)..(101228): n is a, c, g, or t
  misc_feature (169618)..(170383): n is a, c, g, or t
  misc_feature (215487)..(215900): n is a, c, g, or t
  misc_feature (219197)..(219512): n is a, c, g, or t
  misc_feature (223190)..(225026): n is a, c, g, or t
  misc_feature (231050)..(231278): n is a, c, g, or t
  misc_feature (337628)..(337760): n is a, c, g, or t
  misc_feature (338231)..(338759): n is a, c, g, or t
  misc_feature (339729)..(339920): n is a, c, g, or t
  misc_feature (370221)..(370230): n is a, c, g, or t
  misc_feature (453301)..(453319): n is a, c, g, or t
  misc_feature (463068)..(463088): n is a, c, g, or t
  misc_feature (468150)..(472043): n is a, c, g, or t
  misc_feature (492082)..(492852): n is a, c, g, or t
  misc_feature (498905)..(503501): n is a, c, g, or t
  misc_feature (507208)..(510445): n is a, c, g, or t
  misc_feature (527784)..(529975): n is a, c, g, or t
  misc_feature (549747)..(549955): n is a, c, g, or t
  misc_feature (582314)..(583206): n is a, c, g, or t
  misc_feature (772625)..(773155): n is a, c, g, or t
  misc_feature (797265)..(797471): n is a, c, g, or t
  misc_feature (799334)..(800433): n is a, c, g, or t
  misc_feature (833200)..(833347): n is a, c, g, or t
  misc_feature (925588)..(925758): n is a, c, g, or t
  misc_feature (993409)..(993601): n is a, c, g, or t
  misc_feature (1022207)..(1022239): n is a, c, g, or t
  misc_feature (1051506)..(1051582): n is a, c, g, or t
  misc_feature (1188548)..(1189186): n is a, c, g, or t
  misc_feature (1191268)..(1191684): n is a, c, g, or t
  misc_feature (1224630)..(1225512): n is a, c, g, or t
  misc_feature (1229046)..(1229397): n is a, c, g, or t
  misc_feature (1328305)..(1328705): n is a, c, g, or t
  misc_feature (1354749)..(1354901): n is a, c, g, or t
  misc_feature (1376199)..(1377636): n is a, c, g, or t
tattttagcgttgaaattgaaattgaaatgatatttttaattttcaagtgattttaacagccctaactttagcacttgaatttgagcccccttgtgatggggctagttcattcatttccattatctcagatttgattgaggctaactatgccactataccttattgttgtcggccccgataggaggattgattggaactcgctacgaacacgaagaaaccccttgaaaattgaaaagttcgcggcgctataattgattctaacctaattgaaataatgccatccacataaatctacaagctccataagccgagctaacctaaccgagttctttggctatggctagatcgcttgctagaacgggctaaattggcgttgactagggaaatgaccacggcccagatcggaaggacggtcaaaaactgagaagtctcgtcattttgtctaaaatcaaaggtcttcctcttggttaccgttggaagttctgccaagagtcttgacacaatgcatcttgggaaagggctctggctagttggtcaaattagccttcttgttcaagcttctcataatcatcatggccaccaccaccaccaccatgcgagatcccatgacctgcacatacccgagagtgcttctcatgtgtctggatcagttcatgcagtgacttcaagtggtccatatgcagctggggaaacctctgacgcagctgatgccgttgcacgggctctcaaagtcttgaaacagagaaacaagcttcgccttgagaatgtccagcacaacaactacaagttaagagctttctctgacaagagctctgatcccaattctcgtcccctggactacagcccgaaggctgcagaaacctcgacggattccaacaaccagaccatccgcagatcatccgacacaaaagagaattatggatactcaattcccccggaactcagagaggctgctcgaatccttgccgagtcaacacccccatctccatcgacaggaaaccatagtgctgtggcggccttgatgcgcgaaaagtatcgtagcgggataagcgacacctccattcctctgcagagctatagaacctacgatggtttatctgatattgtcatgcaaaataaccaatcagtaccttctggaaattctattcctgaggaaggactcggaaagcgagcaagctcaagttggtggatggctacaatggtccaacgtggtgccaatccgtacgcaccatctggttacaaagtatggttgctgtttatcttataacccatcaacataccaaactaacgttatcgaaggtttggagaaatgtcaaagattatggagctaagggtaaagaaaaccgcattctttaacttattctgatttctaattgaaaagtttaggagatggcgttaccgacgacactggttagtccaaaccttttcctttttttccccggctttttcctttcttgggtccctttgctggagcccaggaagttcagacaggaggttaattcattatttctagcggctatcaaccttgctatctcagatgggggccgttgtggtgccagctgcggttcaagcacgatataccctgccgtggtctacttcccgcctggagactacctcgtcagcagtcccatcattcagtattttaacacacagatcctcggtgatgtatgactccccacctgggcaggtgattctcgttcctaggttggaacttaagaaatccctccgttgattatctgcatgtgggctaacctctctgtcagcccatcgacctacccacgattctcggtgcatcaagctttgttggtcttggtgtcattacctctgatgtttacgtcggtgatcaagaagaatggtacattaatacgaacaatttcctccgcagcgttcgcaacttcaagattgatatcacccggacggaccaatcagcctatgtctgcgctattcattggcaagtcgctcagggaacgtctcttgaaaatatctacttctacatgacccaagatgcgcagaccactcagcagggtatttatatggagaacggaagtggcgggttcatggctgacttgacctttgttggtggcaactttgggtaagaataactaaaatgccttgagttcgcctttcatactgatacatgcatttcaatagtgcttaccttggcaaccagcaattcacaaccagtcacttggtgtttgtgaattgcaacaccgcagttcaaatccagtgggactgggcctggacaatgcaggatgttattgttgaaagctgtactaccggtattttgattgtcggaggagtaagtgtcaagataagctgactttgatgaaaaagcaaagcaatgctaacaaggtcctataggcaggtggtccttacagtacagggcagggcgttggctcttttgttttagttgactctctgattgccaacaccgctactggtatcgtcaccacactctacaatgagaactcaactgctttgcttttgcaaaacgttgggttctataacacgcagaccgctattttggataacaacgtgaacaaggctttgatccctggaggcgaccagaccattcttgattcatggggcttcggaatggtcaatgacccagacagtgcacgttttgtttctggcgcgaatttgctcgctatgaacaggtcctcttcgctcgttggtagcaccctttacaataccaagcctaatttcttcacccgtcgtcgtccgaaatatgacgatttggggaattctcaggtgctggacgtcaaggagctcggtgctaagggcgatggcattcacgacgatacgaacgtgctaaactctatcctagccagagctgctaacatgtcgtctattgtatacttaccgcatggtgtttatgttatcaaagacacgctcaacgtccccaaaaactctcgcatcctgggtcaagcatggtctcaaatcatggccacaggcgataaatttgaagatgtgaaaaatccacgtgtcgccgtgaaagttggaaaaaagggtgatgaaggcattgtcgagattcaagatctccttttcaccgtatccgggcccacggcaggtgctgtactagtggagtggaacatacgcgagtcgacacaaggctccgctggactatggggtaaagtctcctagatctattggcgaatctgttacttgatcttcctactgacgtttacttccttacgacagattctcatttccgagttggaggggctaaaggctccaatctacaagcctcagattgcccaaagaacagtggctcggttaataaagactgcattgcagcgtcgctgatgcttagattgactcacagctcctcggcatatctggagaatgtctgggtctggactgccgaccatgatcttgatattgcgtctcaagatcaactggatatttacgcagctcgtggcattcttattgaaagccagggaccaacatggctttatggaaccgcctcggagcaccaagtcttttaccagtatgagctatatcaagctgaaaatattgtcatgggaatgatacaaaccgagtctccctacttccagccattgcctgctgcacccttgccatttacgcctggtctattccccggagaccctgatttcacaaactgcacctcatcctccaagacttgtggcttctcatggagtatgcggattttggactcttcaaccgtttatctccttggcgcaggtaagttgatggcgagaacacttggccattacttcaggctaacgattcaacaggattctacagttggttctcggactattcgcagaaatgtgtcgatgaagagctttgccaagaccgtgggttccaaatcgaggagagctatgatacatggatctacaatttggtcaccaaggcaatttccgagatggtgagcccgacgggtgaaaccccaacttatgctaaggacaacaagaatggatttttatcctctttacttgcttggatccgaggctcgaaggtggtgattggtggtcgcgacctcccaggcttttatgtctgggacgctaatactgacgcggatttgatgactggcctgcctgattcctgcaaaacctcactcacccaattagtcggatgtgattcgtacgcgcggctgtttttggctgagagttatcggggatcattgggtaatgacactctcacagaatcagtctgtgatgaaagttgcggcgtctcattgaagcgctggtttgataatgttgcttctgactgcaagggatacaatgtttctgattccgctgccaccaaatatggtggacagatctggtctggctggaacgaaacctgtctcaaagataccagaacgggagaatactgcaatggtaagggtatctcgtgctcgttttctaagtcgctagtgctaatgatggcagatttgatatccgaatatccagccgttgacttcctagatgacatgccggaatcggaaatctgctcattctgctttgtcgagaggctgggaattatgcagcggtcgtcatactccttctatgatgaagggttccaggatcagttgggtaccgtcaatgctaaatgtggactgtctgttccgacagccaagcccccatcgctagatgcaccccctgagtttctacctgacccaatctgcatctcgaatcaaacgtatcagacagtctccggtgacacatgtgactctatcgctttgagatacaatgtttcatctgcttccctggtcatggcgaacaatcgccagctcatggtctgcaacgacttgactgcagagatggatctttgcataccaagcagctgtgcatccacatacaccctcaagagcaacgacacctgtacatccatcgaatcgtcgggccttcgccagcgtggtgatgtgaggaaatacaactcatgggttgaatgggactgctccaatcttcaaacatcaactgacttctggggccacataatttgcctcggcgttcaaggaggtacatacactgctactgcctcgattccgggagttactctagcccccgaagagagcacaggatatacaaattcacgcgtcgcgcccccggccaatgctactgccgctgaaggtacaaccttgaagtgtggcaagtggcgcgttgctgtgaagggagagacttgtgcacagatctgcctgcaagaatcaatcacctcaagtctatttgtcggagtgaacccgtctctcgcaagttcgaattgttccgacggtttaatcgttggaaatgcatactgtgtcggccctaatccgggatggtcgttctctaattcgactacttccttaagcacccaaggaaggactccagggagcagctcaatgccagtttccgcagctattctttgagatctactcccgcgttcagactttttctgagtaatagctcgtgacaaatccatcgataatcctaggtagacctccctactatagagactagatgtgattttcaggcatgattgtgcccaagtagccttcggggaaactgatagtcatttggtattcgaggatatgccactgcctccaaacaaagatatatgagacccagatacagctgcaatttgaatgttcaaaatatataatgatacttctaagtaagtgcacacttggaggtggaatcggaacagcggcatcgacggtctcgatgattttcgttatgtagataaaagacaaaaaggctaccctctcccacacccttgctgcgctgatcgcaccgggcgtctccgaccaaagtttttaggaatgaaatttccatcttgatcctgcgctgtcccatcgccctcatcatagacaggaatccagccatccggcaccttcggacatagctgttccatttgatcgaattgaagattcaagtaaagaggccacagtgcgcacactagcgacctcataaacccacggtataaaggcgaatcatacctctttgcggtatcataccgtccatcaactaccccaacgaaacccccgtgagggtcgtctgtcttaacaagagagttaagtgatcgctcatcaatcatcagacagacagcaaagcgagaatcatcacaatgttcctcctgcttaattttgcgcagatactgggcaaaatgagcacgtacttgctcaatactagcaccgtcccaacgccctgggtcagagatgatgacatccttatgagactcttctatcaactgctcggggcggggatcattcccatagcgtgtctcatggtgtaattcacccttcatccattcgtgcatcacgcggatcagcttttccttggcgattggccataattcctcagactcaggtgtgtagactgttcgatagataatatacccccatggaaaatgatatggaaattgtttagtcaggaatcgatgggtgatgcgatcagtcgtgcttctgtaccacggctctttctcccaattttcggaggcctctttagtgaaatcgggatgatgccagcgttttggccagaccgggtgatgatagtgtttgtcactatccagttcctcgacctggtcgtttggatcattgaacggggcagattcggatgaggagggcggggaattcatctgtggaaagtgatacaccacataagcaaaaagaaggagaagaaacaggtagtaaattatagagagtaccatttcgataggaacaggaccatgagatgctcaggcgcgggtgttggagagaaaagttgaatgcctcaagaaaacaagaagagaagaagctaagaaacctacagggctgtgagagggtttaaatagttcaggcctacttcccatcggccaatcatatccagacttcgtttagcgcggatccatccttggaacgacgactcttggcatctgtttgatgggtttgcatgcttccatagccccgtgcagtaaatagccctcaaatccagtcttcatcatagtgctcctcaacttgcatcattcctgcgtgaaataccagtcaattttcgtatcctcgctcgaactagactgcctaccaccctatcccatggggttcattgatctgagcccccaagtcataaaaagatcccaaattggccaattagattggaaaggtatacggtatgcaggtgtaaggcctgtcaaccaggtaagatacaatggtccaatgagggagagatctggaacgatatgtatttgtcttctaggtgcaagactaattcttgtcagatctgtcctggggtctgaggacccttagttatttatgacggaactatggtggggtaaggaaacgatccgactgcgggacgatgccgcaaacggctcggaccaccagtctttcaccgacatgtggaatggtatcactgctgacatgtcgttccagtattgtcaggggtattatccatgacagacgctcacttatcctctaagtgcaagaatagtacaaaatcctggtcagattatactttttcttggtaaatcctatgcactctactctatagtgtagccattattttccatgacttttattaccaggtcgttgccgttgaatcttgttatcttgcttcttggagtagttgaacccccggattgggagttgaacccccggattgggccggggaaaacctcgggccgagatctggacttatagactggaacatgcacaaaaaacagacattaatcagcagggttatgaatgccaatattgtagttgtgtgcatagaaatgggcttgtttgggctttgctgaagtctagtgaccatcactcaacttcaccgcctggccatataccacaatacacacatcaacaccctcgtccataatatcgtcagcgctcatcaacgaccatcaacgcctggccaacacatccactccgcaccaaaagactcaccattttgttcgctccaccccctgatggcagatacattctactgcggcgggaagactagccgaccgcaaaccatgaagacaggagggttgggaatacggcactcgataacgaaggttggatcttgaatttacgattctggtgattgatttgcatctatctagggctgatttcattcctccaatgatgatccttcgaaatacgaaatagatcataaagatgttgcgcagatctttgcttcttcgagtactgttgaatactcgaatactggtccctagcaccgcgaagaggtgcctgcacatcgctagaggccttgttaacgcagcaatcccctgcggggttccttgttctcgcagcgctctcctgcggatgtccttggttgcgcagcgctcccctgcgaagattcttgttttcgtagcgctctcctgcggaattccttgttgacgcagcacctccctgcgaggattgttgttgacgcagacctatcctgcgaagcaccttcttacatcgctgggctcgtggcagcgacagccgtggccatggagactctcaagcccgcaggcaagagggacaccatgacacatcggagtgtgaggaccgaagtcctgattttttttggctgggaatccggctccttatataatttttcggctacgtttctaccaaggaaccagttgcgcagatggtagcgagaaccactgtctcgttgatgggcgttgaagcgagttaaacgacgttgcaatggtctttggagactttgtggcctacagagtcaagtttcaacctggattcattcctttcaacaacctgcgttaagtgtggctaaccacttcatcaactgttgaaaagacagtgataccgcaagaaaatacattgcaattaaattgctcaacgcggtggcactctacatctgcccgttctagccacgtcgctcgtctctttcatgggggttgaagtgcttcaacagaccccgcaacaatgggttggagactgtggcagacagggacatccgattgtaccggctgttggccataggacgtgcctcccattgatcccactagaatcaggtttgtctatctcctagccccgcgctgctttaccggtactttttttctgttgctcttagccaactgatgttgcctttactagagtttttgctacctagcgccttaggcattatgaacatccttatatatccaggatgttagttgtattctttgacggagaatacaaaagtctagaccctgttagaaagcctagaatagaaacccgagtccagttttccaagacaatgaaatgagttatttcagctaccatggccacgagctaggtcctcgtgatcgccatccacatcgtgagattgcaacactactgtcccattgatgaaaccctggacacatgaagcaccggttgtatcaatcaaataccaggcgcgaatttagatagatacagatcccaggaacgacccatgggacagtagatcaaggatattctatttgtggcccagagaagaatttggaaggacttacaagggtctagacacaatccacaaatctagtcttgacgggccgtcagagtacagatagaacaggcctttggtacttaggggtcggtcggggcagataacgtatttggaatatcgtatagacttttagcaatagagatacaatccgccgaaatttcgcagaaggggtaagacttctccccattcccttctcttaatcaattcgttatcttattccaattctaggggaactttagacagttcttagcgtaaatccttaggtcattcaccggaaccccgacctactcagtgagaattgcgacagcttcaacccagaccgctggctccagaaagaatcgggacgaatagatgcctttttaatccatatatgtatataccccctccgactactagtttgtaaagttaactaatgaccatttcactgttatagtggggggctggatacaacgcatatcctaggcgcaatttcgcgcaatttgaaatatccaagcttactaccacttttttctaagactatgacattaagcaagcggatcctaaggaagagtagatatagcacaatcgttttatttacataccgagtcgttggtggagacgatgcaccaggttacccatcgaagcttccccaacctactcgagcattatcgtcatagaggtcaggatttcctggtgtgggaagcggttaagttatccataggccaggtactaaggtcgcgatactccatcgacgaaggagccctcgccgcaattgtttggccggtaggtatagggcgtacaggcggtctccctcctctttctaaaggaaagggtcgctaccattaagaaactaacggctaataattggtaggtcctaaaataaataaagcatctccgtagatagggcagagtactggctaccttaagcgccgacacaatttttctcacagagtccagtatcgtcaaaattggtaagtaaggggcagtctagtttacaaacaccttcgggtagtgatactaacgaggaatatatagcgggggtggagcacagttaccaaatcgacgcgactgagatagacgctgtaaccctgaagctgatagccctggctgacatggtccaaaacttgataacaagaagctctccaggaacaaaatggagccctaaggcccagagtctccccaaggatctgaaccgactgtcggttaataagctactacgagtaagtataatcccacctgtctatcatacaagactgcggctaaccaggcagagtaaattctttgagcaattagggtctagggaggaattaaaaatactagtaaacgtggtaaacaaagatacatgccacaaaattgattttctcggttacacataagaagcgcataatattcacgcgtatatatccgtgcggaaatcccatcgtgtggatgttctttgccgtaaatctaactgtaataggattatctgcgtagagacctctggaatactttctaaggtcactcaaattagtcactggagtaaattccctacaaggtttctttctacttgattttttggggttatagggtattggttaggtcactccccacggcttagcattagtaggcgaaacccttctcttaatccgagtatatatatatatatctctataatagtctccctttacttttctgttcaagaaaccaaacacacacttgccgtttctaacacagtttattcgcggctgatccttctcagaagacttctatctcatcagtagtagcctatcaacgcgtaaaagcacataatggtcgtgatacagccgtgttttcactacaaacaatataagatttcctattataggggttcaacttgggatccacccactcctgcttatcgaggttacgataagataagtaggctcaatcagataagtgggaattcctacagatactcgcatctgatatgcttacaggacataaaaaacaaaacaatatatcagcaagtcagcctaccagaacctctccccaaggtttacagtgccacttcgcgagatatctcctgatatcaagtccaatcgcgttcttccgccggcgagctactattctagttcccatagctttataaagccttcatcgcctcggtgactcccgctctgacacacgtcaattcagtctctagccgactagttcggagcgagctagcttcaagctcagtccaaagccgacgagacttttcctagaaccaatcgcttttgctatacacgtcgtctagccaggcccgagtataaccgagctccacccccagctcgcagttcgcgccttccagttagcggatttttgctataaataacccgtcttcttcctcatacaatcttacatcttcctatgtctttgttgagtgccaggaaaactggcaggtataggaattctcatatcttcccctagatcaccgagtcagaaccctgcaaggtctacggtacaactgcttcaagcgaccggcccaattcttcatatatagcccgaaatagaccgacagatccactactttagctcgactgtaataacaatttcttagattccgtcactaaccaggcgtatctgtcctcaactagtagctggaggcgaacttagctaggagcaatattaaggccaagtcgattatctggattcattagttccccctttccgtaggatatataagacaggtatggatatatacagacagtacctctcgacattactatcttatcgcagcacgcgtttcattacttttaagagctatttctttgccctcccatatatatcaaatatacgagaataaatagccacagtttttataactaactataaaagattctatctccaggtcgttatatctataggattcggttgacagttcgttaaatattatctattaaagtctaccgaactgtaagtcttcaaaaggattaatagataaacgtattagagtagagataaacggattttaacggtaatttctaaagagagcagcccttagtactacagctttaactatatactaatagctaatagcctctagattaaatataaacgatagctcaactattcggtggtcttagactaacgatcagtgatcttatgactaccaaataaggtaaagaacgttaagaaatatagataaggctaaattgtatcagctacatatataagataagatttggctattagtctgcctatataaagcagagggctattaaaggcctacccctatagtcgaagtattacacaaatattaacatatagtttattcttagttaaagcagacccagctatccccttccctatatcgcttaactagtttggaatatctactatttgcctaccaccgaaccaataggtttcagattgatgcaaagccttgtatcctttaggagctcctcgataacttaataatgcccgttggaatcagcgtaccacattaaactcttgcccgacttatctacagcattgaggtctattcgggaatcctctaagatgaccttcacggtgtgtagataagctagcggccgttgacagggcgctttcgccatctttattgttttgagagttgatattcaatcgtttgccctgcttcagtaggagactaactaccttagttctaccacacttcacagtaagccaaagtggggaatcctcccctgggcggactgcattgatttggatatcgtttctctgaagcagtaatttaactatgtcaacattactgtcatgtgcggcgtgaccgagaggtgtccaacggaaagacccgaggacatttagatccaactctggatttttaatggcgtatctgactacgttatacctaaaaaggggaaacaactagtgtggattcgctaagatctaaatggacgagggagagagagagagaggaagagggagcggaactatctaataatctgggtccatataggtgactgccttccggtcacccaacatcccccctatagatcttatatctcctattttaaaaataataatcttaaaatgttataatcgtggtagttataaaaaaccccaaattttcctttaaattaagttatcctaataagctttaagaaagctcggaattactctttaggaagtgcctttataaacctgtctgccgcgttctgctttatattaacccttaggatatttatatatccttaggccacagcgtcctttataaagaactatcggagtacttactatctagtagtagacttacctcccttctttattagtagtaactgtaaattaatattattagtatagataactataggattaggtcttagtaggcttagtaagtctataaccttagtaagctatatagtatcctaggccggctaatcgagtatatactattctactattattatagagttcgctgtgattatctactttttagtagactaagctactaggactcctataaagaactagatatatccttcggttaatttagagtctatttagtctatatataatatatctataaatactataaattatagttcgtctaactttctaaagattagtcctatcttagggttatatctaaggtacttaataacatatcttattaccttaagattagaaaaagttggtattactagtctatattataggtatataacggcgaatctaatatctggtcttatcttaatagtaagctagttgagtatccctactactgtttagtagtattcgaagttctcgttatcgagtaggttagagttaatatcttctaggttagactctctctatcctagtggtagtagtgtttctttcgttcccatagtatctgtaatatatagaatcttttgtatataggcttcttaagatatgataattgtcttagcattataatctctattaagttgtaacgggctagagcccgcacaggatcacgtaataagcacgtgaccttcgccacccctgttttctcctgtttcttcctataagcttcatttcctttccttaagcttttagacaatagcaaacggcttagttagcttgaattctaatctagctctgtcccttcatattctaaaagcttccttttccgtagaagattagaagagtacagaaggatataccgacgaacggcataataaacgagaatgtagaatggtcagaaccgcccgaatgggctaaagtgatgatatagcgattagtctagtctactacctcctaggaggagatcgcatgagtataagaggaaaggattaagaagcttaaagagctagtctagataaacgtgatagcacaagaagaatctaataagaataacgagactaaaaacgaacctacctaggggttatcggaaatgagataaaccatacaaccatggctatacctccccaacccctataagacccctaggtatggaatgcctaagggaatgctgtatgtaatagaggatcaggaaatagagatagtagtatatatagtggtatattaggaactaatagctgcttctctaaagaagcaccatatgaggataatatataggttataggttatatgattaaagggggctgtataggcagtatacacggctcctgcctagcctatagttccctatataccttaataggtataataccttaggtattagccttcttagtactagggtcctaataatatccccctccttannnnnnnnnnnnnnnnnnnnnnnnnnnnnnnnnnnnnnnnnnnnnnnnnnnnnnnnnnnnnnnnnnnnnnnnnnnnnnnnnnnnnnnnnnnnnnnnnnnnnnnnnnnnnnnnnnnnnnnnnnnnnnnnnnnnnnnnnnnnnnnnnnnnnnnnnnnnnnnnnnnnnnnnnnnnnnnnnnnnnnnnnnnnnnnnnnnnnnnnnnnnnnnnnnnnnnnnnnnnnnnnnnnnnnnnnnnnnnnnnnnnnnnnnnnnnnnnnnnnnnnnnnnnnnnnnnnnnnnnnnnnnnnnnnnnnnnnnnnnnnnnnnnnnnnnnnnnnnnnnnnnnnnnnnnnnnnnnnnnnnnnnnnnnnnnnnnnnnnnnnnnnnnnnnnnnnnnnnnnnnnnnnnnnnnnnnnnnnnnnnnnnnnnnnnnnnnnnnnnnnnnnnnnnnnnnnnnnnnnnnnnnnnnnnnnnnnnnnnnnnnnnnnnnnnnnnnnnnnnnnnnnnnnnnnnnnnnnnnnnnnnnnnnnnnnnnnnnnnnnnnnnnnnnnnnnnnnnnnnnnnnnnnnnnnnnnnnnnnnnnnnnnnnnnnnnnnnnnnnnnnnnnnnnnnnnnnnnnnnnnnnnnnnnnnnnnnnnnnnnnnnnnnnnnnnnnnnnnnnnnnnnnnnnnnnnnnnnnnnnnngaacttaggtatctcctatatataagggtatagctaagtagttatttactagtaagagaatatagttaggataaaggggaatactatatatatatatacctaggttacccctaatatcttcttctcttctttaaccccctatcttatttacttagtaaatatacctaatttatatttctattaaatttctattaagataatattattctaattagggtactactattagctagtaaatatagtaaatatatctttagatttagtagtattatattctatatagtatactaagaaaatttaatattatatctatcccttccttatagaaaacggccttatttatatatttatatactaattatatttatagaataataatagtatattattatcctatactatcctcctctaaggaggataaatctctatatctataagtataatattatcttttagtaggctataggtctataattctatctctatacttagaaacccctaagcctattaaagggctattaccttactagtagtactttttctagctataaagctacctagactataagtataagatccttataggttatattaaatatacttactactctttagtaaaatatagttatatccctataagtttaactatattattatagggaggaatttattattaataatagtatagcttctttttaaggtttaaactactacctatactacttttaatatattacctatatatacttatataccctaagtatatattattaagcagaatattaagcacttaatctatatagctaataaagctaaaaaggctactactattatagaagttatagaagttattagggtcctaagaattgtagaaaatataggagaaatctctaaagttaaggaattctttaatactcctactagtattctagaggaaagtatggttcctaatataggtatacctagtaatactttatttatccctaaaaacttagtccctacttcttagggtatcttaggtatagagtctattttactactttattatatttttaatactactttattagtatttaagtctagttaggtatactaaccctacctatacctatatataaattctagtaaatatagggaatatagtactaaattttaatctataattaaagcttcttatattttaagtatatattcttagtccttatcttttttagtatctttactactatagttatcctagccttatagttattaaggaccttagtatccttaactatagactatagttcctagattactttaatattattatagctatactacttaactaaataggacctatttttcttactttaatagaataggatatattcgatcttatattctacttaattattaatcttaattagtttaggaatattattattagttagagtattactataatataattctagtactaatatatagtatattaggtatagtaatttaaaatagagggatagatatagcttatatacttatatatcgaccttcttaaagattagaaatagacctagtattttataatctagtttcttacttagtctacctatttctatattcttactcttaagatatacctaattactaaccttaaataatttatctatataatatttatctatataatactttattaactcttttaccttagtaagtcgctcttttataaagctccttatttcttagatttcttataccctctatatagtatctatatagtactctttagggtactctttaacgctatcttagataaataagttatatcctattaatactttatacagtgactttctagttatactataagttattatattatatataaataccgcgatagggagctagtatacccagttatcttattcctagttaatatataaccgtaggaagtactctagtacctagttttaacgtttagtctatctatcggtttagaggtagaatatagtagataactagtatttaactataaggagaaagtagaaggtcaactagaactagctagtaaaaaggctacccctattgcttactagattctctagtatactaaagatcgggctnnnnnnnnnnnnnnnnnnnnnnnnnnnnnnnnnnnnnnnnnnnnnnnnnnnnnnnnnnnnnnnnnnnnnnnnnnnnnnnnnnnnnnnnnnnnnnnnnnnnnnnnnnnnnnnnnnnnnnnnnnnnnnnnnnnnnnnnnnnnnnnnnnnnnnnnnnnnnnnnnnnnnnnnnnnnnnnnnnnnnnnnnnnnnnnnnnnnnnnnnnnnnnnnnnnnnnnnnnnnnnnnnnnnnnnnnnnnnnnnnnnnnnnnnnnnnnnnnnnnnnnnnnnnnnnnnnnnnnnnnnnnnnnnnnnnnnnnnnnnnnnnnnnnnnnnnnnnnnnnnnnnnnnnnnnnnnnnnnnnnnnnnnnnnnnnnnnnnnnnnnnnnnnnnnnnnnnnnnnnnnnnnnnnnnnnnnnnnnnnnnnnnnnnnnnnnnnnnnnnnnnnnnnnnnnnnnnnnnnnnnnnnnnnnnnnnnnnnnnnnnnnnnnnnnnnnnnnnnnnnnnnnnnnnnnnnnnnnnnnnnnnnnnnnnnnnnnnnnnnnnnnnnnnnnnnnnnnnnnnnnnnnnnnnnnnnnnnnnnnnnnnnnnnnnnnnnnnnnnnnnnnnnnnnnnnnnnnnnnnnnnnnnnnnnnnnnnnnnnnnnnnnnnnnnnnnnnnnnnnnnnnnnnnnnnnnnnnnnnnnnnnnnnnnnnnnnnnnnnnnnnnnnnnnnnnnnnnnnnnnnnnnnnnnnnnnnnnnnnnnnnnnnnnnnnnnnnnnnnnnnnnnnnnnnnnnnnnnnnnnnnnnnnnnnnnnnnnnnnnnnnnnnngaggactataataatatagtatataagtcctataatataagtattatagataagtattatattactagcgatataggaattctagaccccctagtactatacctaatagctataagagctttttaaggtaaaataatatatatactagtactaaagaactctatagtaaaattactctatataacacaggatcgcgatctaacgtcgcaggacatctatataaaaatagaggaggatagtattagtaagtaaaagctaagtaatacaccctagggattaacgctaaataggctacttaggtttaataactatatttatatcctaagagagactacgatcttatataaaattataaagatatactataataatccctagggaggctattatactagtaaatataccctcgaagctatttagtataagttctattagtatagaattataaaggatataaggaagtatatatataactatataaattattaatataattcagtatataggtataagctatatagattactatagctattactagtacctaaaaggcctagtaagtagcttagtatagattttattactagaatacctttattatagtagaatagtaaggtatataatatagtattagtcttaatagatatatttactaagtatatcctttatcttccttatataaaagaaattaatatatctaagttagtagatttattatataaatatataattctaatctttagtatactaaagaacctagtaagtaatagggatagcctttttactagctaattctagttaaccttctacttccttcttataattaaatactagttatctactatattctacctctaaactaatagatagactaaatattaaaactaggtactagagtatttcttatagttatcttgctaataatctagaccttcgactatactccattctgccgggccttcgacgtgtctgtggctcagtgcgcccccgctctagtgctaagagcatacgcaataaaagaccaaacttctcggttgcctctggatacgtaagggacaaaattatacttttggctgagggattggctgttcatgcaatgatacagggtcattttctcgacttagtcgtcttatagatgagcggtggttgtccacccaaaaaaaaaaaaaggcctccctttccgggaaaccatttatcgcgaagtaaaagtgaacttggtgaaatgttaactaagactgacactgggaagatggagcctttagcagtcagtatccctcgccattctagaaccaccgtaacactgacatatagactatgcgtatccaaacctccctaaattgcgatctttacactcaaggctcgaacggataccatgccctggatcatattcaattagagattcgatcagtagagcacggccttcatgatgcagtcctcctggccattcctctgggcaaaagccagtttgaccttgcagttaaacaggccactgtcaggcaaatcaaaaaccacttcacagacctaagccactcgcgtctagtgagctatgatcctcttttcgcagccgaattcggtcgttcctttccagaaaccgcattcagtgctttgacgcaaatgagatatcaatacaacctggcggcgagttcaattcacttatctaaggacccacgccttatcaaatggtttaaggctgaaatcaaacgcattgaaattctcatagatgagtaccgacagcagtgtgttaacctgggccgaattccagattgtgtcaagcagcaatagacgaaactcaatcacgtctgcaaagctatcttctacatcttgcctaattaatcatcactgtaatttaagatactgcatgttcatactattggccctttcccgtatgccagtcatcgcgcaactgcggagaatttgctcaagcacctttccaggggctcgtacgtttcgagcgtaggcaaagcatctatacatatagctagcctcctaagttaaataaaattataaactgctttcgcgcagcgcagaacgagagatttggcgtgaagaatgggattccagtatcatgcgtgaccatgtgtcagcaagagttgccgcaatctgcatattgcatcccacgatggcttggtaactgataccgaatttcgagaatttcctggtttaagccctgaatgaactttatcattgatcttctagcgatagcttgacatcaggttgaatcttgaagaaagcttgaattattcgggcggataaaggccttcttgcttcgtaaaatctttctcaatgtgacgtatttcttttgggtatgtagagcaaagtgagtggcccaatgttaatccggctctagtttaataaacgggcttagggccaggtgtctatccctacgagcacagcctggtgatgatgggaattggacctcaaacaagggagccggcggtcgccctggccaagtttcacgctttgccctttctctggtccacaagcctaggtgtcgagtagagttttccactgaagtgatcaggagattgagcaagtctagtaggcgtgaaccgtcgagcatagtcatatgtcatccagcgagagaactaggtagatttgaactgtacctcgtagggatgtcttatcaggtaactcattattccaatacattttatttgtatattgggtgagaagcctcaaaaacagcaagatgttgggttttcatggagtcggcgattgacggctccagtacggggccatcggcggttcgaacaagcgtaggccgaaagggaacgtctgtatgctccgacatacaatacactacatatgctgtggtggaaagactccaagggccaacatatgggttcccaggagttaacggatctccaggaccatcagctacgttcctaggaatagatgctgcgttcctggaagtaaactgggatctatgaaaccacatgccaatcgatcgattaattgattcatagtctgtcccagccttttggaaacattgccagccacacttggacaacagcaagaccatcgttttatgggtctggctccatgaccgtgtgtataataattaaacacgtggaactgaacaaggatgggaattatagaagatgagaattcgtgaagcctcaggcagcaagactactggaaggaccaggaccgtggttctgaatgagctttttctaaaccgcgaacttgaaagtatccttgaactccaagtagatatatgtgataaccacagctatatttatatctgcttggttaggatttcgctactagtctagaatgtctagaagcttctaaatatatatcagctatattagggttcttatagttgtggtcgatagaaagaactactagagaggcgagataaccgaaccaaggaggtttataaatatagctagcggaaggaacgagccggtcgggcggttcaggggttcgcgtcgcggtccgtcccgccattattttcaaaatcgattccgtcgccacgtggcccaaaagacattaagtagctccgacaggtttacttgcatagaccgataccccagtttgtcacccgataaatgaggtttctggactctcgaggtggacaaagcctctctcaccccgggtgtctctcagtttgctccttaggcatacatcacgggcaaatcaactaggacgggaccgcttcaaccaggctaacctgatctcaggccctcagtgcgagtgaggtagttggttcccggttgtttgtacactgacacgcgcatccgtcctctcaggctatacagacagtctcttgacaggccccgaccctgccgcagtggctgccattgtacaccacgccccgcgagagccttcactctcgtttcgcgttacctgaagaggtctccccccgccaggccgaccgtgtcttgcgaaaagtcctccatgcgctccatcgggcagtatatgtcggttgctctccactaaccaagtttggtccccggtgtctggacagggtcaagacagagcgtggaaagcaccacttggaatgttctactgagctaccgaatttgtaaatatgatcttagattctcttagcagcctcatttaacgcgggccattatccatctatgatgatgtcgcaaaccccaagaattatgtatacggacttgccccagtggttcacattgcatcatccctgacgagaataaccgagcagttctctttgagaaagatagtaaaaatgacagtagaactataattatcgcaagccaccaggttcccaagatagcccctcgagttgagaacagaagttcaatgaaacctgctcatagctcagctccaggttacttacgacatccctcactgcagttgcagccaagaagatcacattcttttttttttcttttcattagtgatcgacccaaattcacgagttccatgggtttacttacttcctttgccacaaaacgggtttggcttcgatccatctgcgcatagtttcttgcaaatttcagtgcccagggcgtctgttgagcagtgtctcttgcccactccatgacagcactccgccattgaaagatgcgctgttgcaaggaaaaggaggcaaagtgtaagaactttgggtacacttatgacaaacatcttgaaagtttggtctaaggaggtcagttggtgtacagactggggaaatgctgtgtatataccagtaatgaacaagtgtacaatgtcttgtcgaaaacgtttttctctgttggcttctgcgaagatcaaaagtgatatgttttcctttcatgtcaggtagtctctgcttcttattgtcactgtgtctccccccctttggtcccctttctaggagataatacctgaagatccacagccctctagggatgatatcctgctagagttaaagaatgccaaggtctgaatagagtggcatttgctccgccgaagatggaataatccctgtgcgatccccaatgaggatatgctctgaatcattagaagcaaaataactctatcttagagatcttattggcatatcaaggtatgacatgtacctgttcaactttgataacgcagaagggatggcattctaaaggttcgctatttgattgagatcttcaaggaaaaattacatacctcgtagcactggagagctcttatttgaccaatgctgcatgcacaccatcatggctcttttcagtggcgttttacttgcaaaacaaatctacataattcatgtctttatcatcactctccacaaggcttcacatcgtactctacgtcagtccgaatgatatattttgctcccttcctcacccctgtaccttcatgtagcaaggccccattcgactccccatgagggaatatcgcaacagctcccatcacaggtcgcaccgggtatccgttgagggtcccttcccgcggggctggcatgaagaatgtcgtctctccgccctcaaactcatcattgagatatagtagaaatgtgtacatcgagctctgtttcttttcctcaggcgaagagtcgtacacgtatgtgtcatcaggaagaataccggacggcggccaagctccgtcgatgtgacaccgatattcggctccgggaacatacctgtacacacggaagcgacgattgatgcctcggaccatgcgaccattgatagagggtggcacataaggggaaattcgtgcccaaagcatgtcgtggaatgtggtgtcaatgatccagtaaaagttgtgggctaggatgctgatgtccccatcctcgcgaaggggcgcgtccggcaggaaattaacagattcaccggcagcgatgatcgccttgcactcggtgggggataggacattgagtgcaaggccaaggcctggcacagcgggatgtgcgtggtatgttatggaaggaccgacaggagccagtgggacggcgttcggcgcggtggtatagagaatagccggatggtggtttgggggtttgcggagtgggccaggggtttgttcgatgatgcggagagcagatggagacttgggtgcctcatccaaaattgatttgtcaaggactgaggcgtagacgggaagtggcgtcgtcgaggggcggaggtcccagatggactggaaggcgatgggattggttgagtcaacggcgtttgtgttggtgtcaatcggggtgctgacgcgcaggatggcatcaaggacgcccaggatttcgttttccttcacactgcgctgaatggagacatgatcgtgtgatttatgctgcgtcgagaggccgctgacgacatccagatctcgcacccagcgacacaatgctccaatcttgggttgttcccccctgatcctcatctctgcaagcaagatcttggcttcaatgtatttctcgtccaccaatgcaccggttattcgagctgtcaagttggcgccctctctcgaacggttagcgacagtctttgagcaggaataacgcaacataccggcagtgttaacacccgtagtgcatgtctggcggaagtcatagaccgcgactcgcagatccttgcatgccttcgactttgtcaggcctggatattgtgcaagcgccgtgagcgtctcaattgtaatgtcgagttcctcgtctgagacgacggcattgagatgcgtgggctcgagaggtatgccatcgggaggcggtgttagattcggtactgctttcggaatcttttgtggaagatcgatttgtgcgttgcgcttacgctttgccgctttggacttggccatagcttttatgtagattgatacagagttcacgactttacgagtgcacgagtctgcgagtcttccaattcacggatattctgcccgaagattccgaccacgggattgcactcggattatataagtcacggagttttccaaggttccgcagcttgggaccttcagattatcttattcgccatacaatccaacctgaggtggttggtgatacattctgacatactcactgttgccctatgcagtttgtagaccttctttgtggcattccttcccttctctttgacttctctgacagacagcttgccgccaaacgtgtagcttgccgttcagcttgctgcgttgacatttcatttgtacgtctgcagagatgcttcttctgttttctggtagatgtaatctggctggcttcgtggtgtgaagctatatagacacagcttcaggacagtagctagttctccattttccatcaatccatcatctttccacttccagttgaccactccttcctctgtagtcaggacctttcatcaattggaaatcttgcattctgtctaattgtgaatgcctacatatagtaatgtaatctgtacatatgtccccgcacttattcttcggattgatggaacttttgcttggaattgtcgaccttctcatgtacagcacgtgcctttcgtttcgttttggtgtaaccttcaattccagcgagcatgatataagacttgctcatcgaaacatgggacatatcaacgccttgttgctgtagggcgtggtggaatgctcgaaaattggcagctggaggccgataatggccactgaacaggttagcctaccgtttcgagtaatgatagaagtcgatggatgaaagctttgactgaactcacctaagcggtgtcaggcttcgaagttggccatgtttgatcttaatcgttccagctgctgcgatacgggcacctcgaagaaaagatgaatgctgaaaggcacctgatttctttatgccgatgtatagacgaaaagaggtatctgcaacctaaggtaaatttggtttagtctgcatctaacaaccacggatccaaacctgactcacgaatagccagataccttctttctctgaggacttgccccagagtcgcttaaatgcagcagcggggcttgcgtgcaccacttttttcatcgtcttggcagtgtactcctcatcggtgaaatgcttcgggtcatgatttgagaggacatcgtcagggctgtgtcttctagacgttgttgatattgttgatgatgaacatgatgaacatgatgctgatggtgacaagtcccaggtggaatctggtagaactgtcgagtttccgttgaattgaggcacatcatcctcgattcccacaatcccttggagactatctttaaaacgtgcagtgtttgtccacactggttcatcgtttttggcccagcggaaacgtccagtctcgtcaactatcaccatgtaattcaaacgttcctcgcgattgagatagcggacttgttctttctcaagtttttctcgtggacactgtgaaagctcaatatttttcccatcgccgtagtccagccaatagaagaagttttcgttcgatgatgtattccgccaacacgtgtggtacgagcgcagattgcttccgtgtcgatgtttgagatcaaccatttcgagaaagtattgaagatccatcatcttcggcttagctccagtaatctctgtgttatgttctgatcgattcaccgtagaaggcgagacttccggaaaacggtcgtcgccgccgacgcgcatagcaacactaaccactcgttgccagttccggcgagcttgattggagccatcatcatcgctgggggtcacgctcggctcgggttgatggagttggtgccactgggcttctcgaaaggcctagagggaccaaacaaacaagatcagaatcgatcggtttcgcgcaaaatacacatgtcatacgcgtacctcaatccatctagtggaagcagccaagtgcagtccatgcagctctcgtcgcgttcgataaccacgatatattctctaccgatggtcagcggacatcaacaacaccggaattcctcgtgtacctgaaccgttcgcgcggcttgctccttatcgatgacgtcatgtgaaagagtcgaagtctccagaattttggtcatggacagaagtcaagagaatgcaaaggagaaagaaacccaactatcgaggagtcaaggaaagaaagatgagtctcagctggcccggcggggaaaggtcatggtcatctttgtcatctttgtcatctctcgttttccaaaagagaacctcaacgtctccgacttgtttcattacaagaattctcaagaattaccaaatagaagagaattggagagctgaatagacccctcatgacgaattttcccttctccccctacaaagaaacgatcggtatcgatcccgagactaaacaggaaattatttccccattcaggacccgaaccccccgcattggcaatctatatcgttcttagatactacgataatacgccggttacccctcgtgaggagatgtgaggagcattgatgttggagcttaccttacttataaatggagtcgacattccctctcaactcttccattaacctcgattatacccattcacttcactcttctcactatggcaccctctctccaccctctcatcgacaatggaatcacaccaggctccagtagcttctccggagggaagctgcactgccactgcgcctccaaccaggtcgagatcaccctggatagcaatgttgcccacaaccacgcctgtggctgctccaagtgttggaagccatccggttctctcttctcggtggttggcgttgtaccgcgagacgccgtctcggtgacagccaatgcctcgaagctttcgattgtggacaaggatgctaccattcaacgcaatgcctgcaaggactgcggtgttcacctcttcgggcgtatcgagaaggaccatcctttcaagggtctcgactttgtacacgtggagttgtccgatgaaacaggctggcaggaaccacaattcgccgggttcgtctcatccattattgaacagggtttccaccccaaagagatggatgaagtgagagccaaattcaaggccgttggactggagacatacgacgtgctgtcgccggcgctgatggatctgatctccacttttacggcgcagaagtccggtatcagatttgccaatttgtgatttagcgaaagtgttgtgtcctttgcatgtactagaaaggtgggagttggtagaggtgcggagtttgaattcggggattatggaaaaatgagataatgtacatgacaagcactatgttacagtgaagattggctcatttagtagaatcctgtagaagttatattcctctcatctcctatcatctcctattctacatcaacatcggaatatcgtatctatgctgacttcagcacttgatcttcaccccttgattactctctcacctttctcgtcacttcgctgtttctcggcggattctgaacatcctcggtttccccgcgcacccgggtttttcaaaaagccgaaaggttgttgactcgatttctgcctcttcaagcgaggagcgcgtcacgctgcatcccacgcgtgcgaccgggtttcttcaaacccagtatacatatctagtcgagttccagcgaacggtgcgcgaacagaatatgtttagatttcccgcattattactgggcccagatagacgagttgcatcaatttccgactgaactctatgagatgtgagcaagggctggttatgtattcctgctacaactatatggaggttcggagcttgatttagactattgcggagtctggagacataaacggtgcctcgtctatccatatgaatatctttggccttgagccaattaccaggtttgggaccgagtagaacgaacgttcactccactcattgctcctcgccacacatcatttggaaaggaatatcttcttttgtcttctgcattgccttgccctcctttactacacagagaagagcaggtaccaaacaagtattggagcatcatcatatgttcctatccattcagcattttattttattattagggaatcattctcgttgcagtcatgctttagtatatgtcaatggtcttttatcgggaatttgaattcttgaactgacgcgtgttctcgaagtttctagtattgatgtagtgcaagtgatcaatgcttgacattctgtacacagattttcgctagttaagggcgtacgttcttggctatctttcttcggtgatatggtactcaccagggcatgaaaagatccaagaaacagatccattgatcatatacgcaaaatatctcaggtcagtcctcgaccatgatcaatccatgtgtactgtgagtatgtctgacttcaatccaggatactgcgctattggtccctactcccatcgtgtatgaatgcttgcgagcatgcgaattttttggggcacagagcatccaagtattgtcctctatcgagctttcaagacaaaggacggccacctggtctgagcgctacaaacaaccaccattctcaaattctttgtgtgttgaagctatcagagctggcgactgacctacggtttgttgaccacagctctcgtgtccaaaatcaggttgaattaaaagagatatttgcaccaatcatctgtgcgaagccgcccgtcttcgatggtatgaaatgggattttcgacgaaggaaataggggtaatgcgagaacaggggcattacgcgacgatcatgagctttggaatgctctagttccagtttcctatgcagatcttctgctatggggaataagccgccgctttacatggaatatctcactgtggtatcaatactaacttggtggctcatggatgtctcaatataagatgctagttcgaaattgcacttttcgatcttttcaccttactctagcatcatcaaaatggatcattattcagattcatatatccatgtacaatcatactaagtgaccaaactatatatggcgtatattcaccctttccttattctctcaatcttcagcagggtaaaaaaatggcaaacataaaaacaaattgacatgcaccaatgatagattaaccgctcagcgtaacccaagctacagcattgagtggctggcgcaaacgatgcagcagcaaaattgagtgagtcaagccaaaggcactagtttggcagctaggagttggcgtagctgagtgttgaattacaatacttgtggctagctgggagagctgaagcaatttcatgaaccctagttcgtgccaattgccaagccagcatgcaggccaaatcaaaatcttgtctaacatttgattggtgatctccgagtcagatcatgtcaaaccgctctaggttgaggtcgcagctgcctatagctgtaagttgccattttgaagtagacgcccatagtagacggcattagcagattttggctgagaacgaatacctgcattgtttggtcgccaataatttcctcacgctgcacgggcggtcgtaaatggcgttgtctgtagagctgacggctacgctctgatgcgtggcttgcattaaaatgtgacaagacagcatatgttaaagttcattcaatgtcgatcattaattgctttgcaggagtctgagactgctgttcagcctgtcctaccttcacaagttgtggaagaaataatataaaagattcgcctcgacccggtgtccccaagtacattcttccataacttcgaatgcacctcttcgggcgattgagaaaaatatcttccaaacgaagtattgcttcaacaatttcgataattccaccagccgataagatggcatctgaatcatctgcgtacgagtactaccagatccaagcccggtttccggccaaagattccaatcctgatgatggcatcaaccgaaaggtctttgtccggcaggatatcgacgaatggagcggcaagaagtccaacaaaaagcaagtggatcttttcatcctggctctggacaatttccagaagctggaccccaaagaaagactgtcttactttcaggtcgccggtaggttctgcttgatcagcttctgttgatggtatttgacatgcatttgaccaggtattcatggacaaccgtttgtacgatgggatgatcctagcccagagcccatgcaaaatggctactgcttccactctcatgtgatatttcccatttggcaccggccatatgtgcttcttttcgaggtaggaggacctgatatctgggaggaattttgtactgatttcattctagcaagtcgtgtatgacatcatgatcaaggaagttatccctcaatttccggaagccgatcaagcttcatggcgtgaacaagccgagtcatggcgtcttcccttctgggactgggcacgaaatggccgtgtccctgacttggccaaataccctaccatcactgttcctaggcccgagggcggatcggatcgaatcaacaatcctctatttcagtttcgcatgcccacagacaagccgatgcgaagcgagggcgtcggtaccgaaaacacatgggaaaatgacaccgaacaggaagagtacaagaacgtatgtatgatctaggcaatgtgaagacaaaaccgagctaacttgatcagtttggcaatgcaattggaaccagccgttggccggatgaagatgaccagaatccaaccagtcagggctggcgtcatggtgttgtcaataaccgcaaagtggcagatgccttcaactctcacgatggatacaatgacaagaaccatggtcctgctgctgaaatggtgtataggctgcttactgtgcccatggactacactacgtttgcaagcacaaatccaacctcgaaagatcaaaacgtcgacgaggacttgaacatagaatatgtgagtatgttaatttgtcatgtcggagcacagtaactgactggaaattcacctggatagatccacaacaatgtgtaagtactcgaccagccggaaaatcgatgtctacatttactttgtgctattatcagtcgcttcagacactaacaacattgacttaaagccacggctgggcaggtgctggcggacatatgggaaatgtaccagttgcctcttttgacccgctgttcttcttgcatcactggtaagtatatgatcttcttcgaccacgtgggaatgcaactgtgattaacagttgcttgtagcaatattgatcgtctcttcgcaatttggcaagctctcaacccggacaagtggatggataacattcatggcgacaatgctaccatccgtgattcatttggcaaagagcatcctgtggacgaaaacactccccttcagccgtttagacgtgacgctgaaggaaattattggacccctgaaggaattagatttccttccaatctcggatattcctatccagagctgccacggtgggacagcaagtatcaccaggaggacggaacactcgaccaagccctgtttaaggaaaacatcatcaccattgttaaccgactgtatggtgtgtcgcgtgatttggcattggacccaaaagctccgaccccagagggcgttgaggcaattgacggtgggctcaaaattaccgacttcgccttcagtgttcgattcttgaagtacgttgtccctgagaaatatctgctgcaacaagaatttacatctaataattttgaatgacttagatacgcattgggagggcaacctttctgggtcaaattgtatctcgcccaagaggacggcatacaaaccccactgacagacttgatcgctgaggtgtacaacttcagccaaaagcccgagttggatggctcttcggtctgcggtaactgcaaaaaaggacaaaaatcgcgcgtcaagtcaactgcttacatcccaattaccccggttctctacaagcttctcaagggcggacggaaactgaagacgttgactcgcgacgaggtcttggcgtacataagaaagcgtgcatactggcgggtattcaaggtaagcatacctagtcactagctgccaccattgtatgaaacttgctgatctctcgtagaacgagaaagaattacctcgctacgaggttgagaaactggagttggaaatcattggcagcagcaacgacaccacgcacttcaccaaccccgctactccgccagcctttgagaatttcaagcaagagcctacaatcactggcggtgctgatggagcgctggatccagagctgaagcagacaaagactgacccaccggctccccggtaagttccgactcctataaatgagggatagatatggaaatatgatcgctaacttcagtcagaccaaaacgaccaagagcgaatctgccacttcacagcagtcttaaattccagcagactctcaaggcggacagtgtcattctcctcgagtcgtcgagcgtggatcttgtccaatccaatggcatcgacatgacacagatttcaatcctggatgcagagaatgatatcatcttccatctctccattcgccgagctcaggatgaaatcattttcaattccaaactcggtggatcatggggcgaggaggagcgggtcgatattgacgatcgattcgaaagtgaggatggtgcgacaattttgatccacgaccaaggtgaaggcttcgaagtctctatcaattgggtccatgcaatttggtttggcaaacgtgccaagggcaggacaccacagtcaattagttatgatcttggtgacaaggaggggacttccgctttgtccgagtatctcgaagtgcgcacctacccttcggtgaaagctttgttccttcaaaagcattctcatgaggaggagaagtagccacctgtggttgatatgtagtttgataggggtataggaaagatggcgatgttaatttgatcaaatttatgggaccgtggacatacatatcctcaagtcaggcctgaaccgacatgaatacaagtatatggcagcatcttgtattttgaaataagacgttgtattcttagacaagtaatgattctccgcaatcacaatctctggtcgagtcaaggccagtaatagatcccataatcaacattcttcttcagtttgtcattcacgcgcagatatccagacttttccagagtcccaagtttctgcgtaataagttcggccacaattcccccaaacaaaatgctccccggcacgttcaaatgggtataatccgctgggttgaggttgtatgtaaaagcattttctggcccgattgcattgagataccaggtgctagttttattcagatcaatataggcagcgtttgagcgatgagcggcaatgatggtggccaaggtctcattggcgagactcatgacgatacgcggtgtccctgttgatttatcgtagttgcgccgagatagaggagtgacgagaatcggtgtagccccagcattagaggcctcagtcacgaatctttcaagattcctggtgtattgtgataatgaaatgtttgctgcgggcttttggtcgttgtggccgaattggattgtaacaagtggatgatagtcgtctcgaacttgtctcacggttgttagaacctcgtcccaataacctccgctccggaagctaacagtggttgcaccgttgtgaccgaaattgcgaccagatgctcctttgaaaagggttgtattgagaagtccatctccccatcctcctccgttcgaggattgagttgccgtggtgctatcacccaccaaaacaaaaaaatggagtcttatgcgaggatgcaaatgcactggaaggatatgcctgaacgtaagataggatactgaggagggctactccggttgctttccagatcacgtccattattgtgtacatggatgcaacctttgtgagttattggggttagagtcattctccgcgaaagaagtgttttcatataaacttatagctctcacatgtgggttgatacactcattcctcccattggtgggaattcctcaatgcaggaaagtgatttgcttgggattcatgaatggagtgacgacattccaccaatcatcctaaatacggaatggcgcaggttgtgttctttgaagaattagtataatgccgtgagaatagaaaaggccaacgtatatccatcacatttcagaggagtatagggcatcacgccaggtagatcatgaggttgtttggttcccccactggcagagtccgagctggatccatcgagtacatgtgaaggttcaaagcatcgcagaattgttggattgtgtggtggatgagcccgagtcgtagggcggacttggaggaaacaaggtggaataattaaattcacatgtcttctgcattggtcagactttcatgagcatctccaggtctctgactgatgtccccaagggcccaagcccccacgagcagaggcaagagtcttcagtgatcttatatacagacagcccttgacggtggatcttacccagaagatcagttacattatatttttcggtcatcttaagttgttttgcaattgaacgtggtagacctaactgctactctaagcggccatatatttcctcggcctgttcttgagtgcatcgctcacaggcgcaagagaataggaagtcttctcgcagcagcttttgccgtgctttgaaatctacatatttgcatagatcaaaatagcaaataaagcactcgtcgcctgcggcaagatcttttgaggtagtcaataccatccgcccattgttgtctgctctccagatgacctaggatatttgagtatgtttgaaatctagtattctcgaggggtaacttacatttggaatgcaggaatggttgactataaaggctcttgggtagatacccaagccataatccacgcctcgttcgattggggggtccggaatgggaaatatcccagtgtcacttggatatagcccgaacgaattagactcttctttgcagatgagatccactagatcatcaacgctaaggtctgactgattatcgtgagttagatatacctcaactagcctcttccagtgcaaaatctgcgtctgaggccacctctcccggttactgtggaggatctcaatggaatcccacccccgcttgaaccgatcttcccaggaatagagctcagatggcttgaaccctgcctgtaactcaatgtaccttccagctagaagacgcatgactgtccaaagcatggcaaatgcatactggccctcgttttgacgaagactttctccgtagtttttcaaccaagcgcattcaaagtcatgccgagcctggtctgccgtccgacaacgattgtcacaccaaacaacatcccggatgcaattcctttggcaaatctctctatgtgtgtcccgtgacacttgttggcggcatttcaggttactgcaaatcgaggcatcaggatgggatggatccgcagacgggatcaaagcatatggtgtatctgccagaatcatggtaccggctgacacaaatgccgagacttgtagcaatcttcctttgtgaggattgtagctttgtgtcaggtttggatgcacgtagatatccgcgtcttgctccagagcatcgacagctgggggcttggcagctgtggacttgactggcttctgtgcaacgatcaactgcctgcgttccatcatacccatgtccacagggccgtctcgcttggtcgctgtgatctgcatcccatcttctgcttgaaggaataggccagatctttggagaaggttgtccatttcctccagatcgtaaagtctgacggaatagaaaagatcttggcggatcgaaggaccttccaaatcaatcacaatctctcggctagcgaggagggttttgtcgggagacagctctcgttcccggcaggccagaagtttttctttgccctcaagccattcccatccactttgactgaagttggatcaaatccatgctccatccacgtggtcaatgacgaaaattcctcctggtttcaggacccgagaggcctcccggagggactgtaggtctccttcatcattacagtgtccaaaagaatttcccagaagtatgaccagatcaaaggaacaatccgatgcaggaatccgacgaaggtctcccttctgaaacgtgacgttactctgcacgttttcttctattgcgcgttttcgagcaaggtcaaggagatatgtgctctgatcgatgccgtaaaaattcaccgatggaaagcgtttggcaagattgatgctatgtcggccttggccacagcatagatccaataccttgatcgaagattcttgggttttcaacagctgttgcacgctagatattccgatgatgtcgttgcattcggcttctgtgattgcggggacttcgacacagtcaccatcggtgtagaggtacatctcattgtaggccttcttccaccaatctttctcgatatgaggaaacaatgaggcaacacggccaagactaggaattgtcattctaaagaatcttgggcagtgaaaacaatcagagacaagactgttcacacggtgactatttatacccatttgtctgtccatgtggatatcagttttctgcagggaaaatattccctgcgcacgggtcttcttgatcttgcgatcttcatggcgctaatgatcgtgcatcatgcatgccacgtcatagaggggtcgaatacgagctatacaacatacaaagggcagcatagcaaaaagattcagctaagctagcgaagtggacacaaatacatctaacgaatgaagccccgagatggcaaacaccaacaagaatactccgggacgaatcatgacgctcactttgggctcgttcggtgtagttgacgagatcccacccctcgtttttgtctgccatttcacaccactttgatattcacacgtttgaaagatgggggctttaatagacagacactggcgcgtgcttatggcagtctgcacattaatgtgggggatttactttagtacctctatcgacttttcaccctgggagcacagctgattcgtccagtttatgatcttcccgcccccctgtcggtttcattacaggaacatttgttactttcaagctctcagtatacgtatttcgtctctgcgctttatacagcctacgcggcacccaacacgatcctgccctttttctcggggttcgctgtacagcgggtagggaaaagaacggttctcttggctaccctcacgagcgtaatagttggccagttgatcttcgctgtcgccactcagttgcgactccagtctgggatgatgattgggcgcgtgcttattggcttaggcggagagataattggcgtcctaggaagtgaaatcacaacgcgctggttcaagtgagctccgattctatcaaactcggggtgctgctaacatctgttgctcagggacaaggaactatctttggcgctgtcaatggttctgtgcatatcgagactaggctccgtcggagcctccgttttcgtccccaggatggtcgaaagctttggcgtggtatgcgttgtatggatcgggtcgatagtgccattgggagtcgctgttactggtgctttttatctactagccgttgacactacaacttcgcaccatgagagtgagaacattgattcgataaaatcgcttcgtcggtttcccgctatcttctggcagttggccttaatttgcatactgggctacggaggtatcaatactttcactatctctgcgcagcggttcctagccgcatggttctacgatggagatcaacgcaaggctggatttgccacagggtaagtcaatttaccatcacgctgtccaaagctgacattgatcctatctagtataccatacttcctctctgggattctgactcccgtatttggactgttgttgaatttgccatggtttcgaagctacccgggggcccttggtgccactaatatcctcatgatggcagcgcatcttctattgctttatagaataggaccgattggaccgatgtgtatgttggggatagcgtttgcatcttatggtgtggtattttgggccgggctcgcgcgatgtctcctctccatcgtcgagtcctgctcgtcaaaagacaaatatgccagaggccgggtgcagagcttcagatgaactcgaatatgggaccattcaactcccgacacaactctctgatgatcgctctgatgctgacggagataacttgccgggggagacgggtgaaggcatcatcacacttggctatggaattatgaccagtctcaatagcctgagtacggctgtggttccgatcctcctcgccaagatagagaatgccgtgggctttacaggcttgcaggttttctttctcatactatcattactcgggcttttcgcatctgttgggttgtcatggtcttggaggatctagaaggaatatatgtcatctcgactgctatgtgagattccgttatctctttgcgttgcactactacttcaaatctagtcgcttcatgtcataaacgcactgtcaacgaccaagatactatggcctacaatgttgtatctgcatgggcttatgtagcctttaaaatcctcgcattaagtcatatgtcaccaccaccaaccaactttgtgtcaaaactagactagagagaatgtctccgaaatcaggcacttcacaggcataggctcaggcatttacacattatggtgttgattattgaacaggtggatatatcggcaccaaggcaagtctttttgaactttgtaaacaatattgatatggtgcctggggtgatcggtgggcttaaatacccagaataaccttgtgatcggcggccttctcctcgggctcgccgaagatatcaacgttccaacgaggcttgttggcaacataaggggtgttgtagcgcttccggttctggcccaaagcgctgaccttctggacctcctcgggggtgagttctatctccttgaagttgtcacggatgcgcgaaggcgtgaccgacttagggatgacactgtgtccaccgacttgagaccaggcgagactagaatactgttagctttcatggaatggtaccacagaggggttggtaagatcttacatgacgtgggcggggctgacttcctggccagtgcgctttgcaacggactcggcaacttccttgacttcggggcgggtgatgagcaggggaatatcgaactggttgttaccaaatgcctagaggctggatcagcattgggtttctcggcaatcaaccaaaagatagatacgtacagagtaagcagtgacatggattcccttctgttggcagtattcgatcaggtcattgctctgaagcacggggtggcgctcgatctggttggtggcagggacgacgccggtggctttgatgagagcctcgatctgcgagggtattagtttgtgtatggcgagtttgggaacaaggaggatacgaacatgctcaatcttgtggttggagacaccgacggagcgagccttgctcttggggagctgggtcatggctaagaggagttagtcgggtctgagttttgttcgcacaatatatccacgtacccttccaggtgtccacaatagagacaccatcgtcaatgatcacatcaccaccctcgacggtgctgttggcaacgagcgggaagtatgaatcgcccttctgaaaggcaacgggccagtgaacaaggtaaagctttgtctgtcagccatgtctcacggtttcactaaatgggatcatcatacgtcaagataatccaactcaagctcggcaaggcaagcatccaaagaggcctcgacaacctccgggcggtgctggctacatgtagagtcaataaattggtagtctaacaatggagttcgagatatcgtacgtgttccatagcttggaggtctgcaacgtgacacgtcagtttgtgaaatcatgtaacatcccaagttggtatagttcgacttacgatgaagatatcctcccgcttcagaccgggaacatctttataagcacgcttgatgccctcggcgacctcacgctggttctggtagctgtaaacaggcggtagcttgtaagtatggtgcaattgtaataggtaatatttcatgccggagggattggtgctgcatacatcgttgccaaatcctgagagaagtgcgggttagccaacagtccgaagcaatgatagatgaacatgtacacaccaggtggcggtagccagccttcagggcctcataaacagcctcgccgaccaggccaggagcagactgccaagtaccaaatcctagctggctggacgtggagtcagtgaagtttctcagtattttctaccgaatatacgcacgggatctggtggccggtgttgagagtgactttcttgccgagagacatgatgtttaaagcggtttaagaatagtttggaagaggaagaggaagaggaagagaagaagatcccccagtctttaacttgttcagttctccggcggggcttctggactgtcctatccccgcccatctcggaggagactccaccgaggtaaatgatggatgttcgaagctgaatatagagtatgatagaaaattcatttacgtctatgtttgcatattcagcttattgaaatgtctactgttgtagcgaatatagagtgcgaatatagaggatatccttgtaacctactatatacttagtacaccctacatagacggtatatctaagagagaccgcggggtaagttatgatgtcattctgcgaattccgggattgaactcttgtggctctcatgttctttcatgtcgtccattttccattatgatttcttttacatcagcagtttggtcaccgtgtggtgttggctatgctctcggatcgtccaattgagcccgcaatattacgctgcggcgtcacccggccgagaatggtacaatatggcagtgctatgtcaccatcgtttcagtttcgaaagcatcgaatcgcatcgaatccccttcattatccttgaacgtgtccacagaagccaagttgccctatattaaaaataccctactccgggcccatgaataccctcaaaagttcgggataattgggcgcacccaatccactcactggatcccaaccctcggtcgcagagaacccctcggtgttgcaacccgggttggtgcccttggtcacgtcaaagaacgcctccgggtgggcgtacaatacaggattgacaaagccaacagtggacttgcccgcggccagtcgctcctcgttgatgcgcgtgaggattccagcaaacaccggtgcagaggccgacgttccaccaatcgacacggcaattcccctgtaatagatgatgaccttgtcaccaatagcagcaacgtctggataggcacgtccgatccggttgtagataccgttattctcaccgaagctgctgttgtccacgctctcatagtatgggtatgagggcttggccttgtcaaagtaatcggcaacagcctgggcctgatagtcaggcgccttgtaaatgttgctgaaaccgccgccggacgggtacctagacacagcctgctccttgtgatctcctggcgcagaacccgtggggatttcagtgcctcccaccgcagtaaggtatggacaggaggcaggaaaatccggagtaaagattctgccatcggggccgaggcagttgctgggggtagggtcgcctccgcgtccagccacaccagaatcacccgaagcgaccaccactgaaactcccattgtacccagcttcatgaactcggcacattgtcgccgctgataggaaatcgggaggtctgcttcggcggagccataggaaatcgagatgaccttgggcgggtcgtacaccccacattgcagggagcccttgtagcctccgtctgccgggtcgggatatggagggtccaaaggcgagatggtactgcagtacgagccgtcgatggcgtccaagaacgtgttgaggaagccattgaaggtataatgattctcgtaatgcatatcatcgctttggaaaagcacggagttctgcggccaaataatcgggtaggagatttggaagtccaggttggattcagccccagcattgaaactgtccgtaggagcctggccaccatcaaccgacttgagagttgggtgtgtgccatgggggattttcctgctaaaaagtcagaaatccaatcaactaggaatttcaattcaacgcgacatacgagtacaagttcgagaagaacaaatctaaatcttcctgggcgtagacatccccggtaccctcaaagactcccaattcattcccctttgtagcagagtggccttcgctaatgttatacatctctgtaggcttgtcaacacatccagcttgtaggtattcgtactcagatcacttacgttgaatgcattggggtgtaacgactcgggagcaaaaggatgaagcctcactcagcagctcctcaattggtatgaggatcggctcaataatagggggagccccatccacgacgcgtttctgcttctcagtcgatctccgtacaccagtcacctcccgcatagaaatccctggagtgacatagtcgacgtgctcacgcacggagctcgggagatgatatctatagtcaggggtcagcgagactatagatccaatccaaatgatcaatcttactcgcgacaggccacatgcgaccggcccgtttcagcatgtgagtagatatagtactctgtgtccagcaaattctccagttccttggcatcggcatcaaactgaatccattgcttgttggctgattgcgtgatgcggtcttttgcaataccagttgattccaaccaagaacgcacgtcattcacgctctgttcagtcggggcaaagaggtcgtgcacttccctgatggacagatgctgtccatagcgactcgagtatgggttggacctagacagatgtcaattttgcacggtggtagattcattgcgcaagtccacacaagtccataagtagctcatggccatagtcaaggttagactgggtcaacccgattcgcacaggtagtgacaacatttccttcgagcttcttgccttcaacccaagattttggaatgaaatcacgacgctcgtgcaattgataattatgagccgttggtactgccatcacactggccgacagggcacaaagcacaatgaaagatctcatcgtaatagtcttagaaggagttagctaattcagcttgctccttcgaacttacggatcatgtgggaaagacccgcgtcggacaatgcatcctttatagcattcaggtcgttcatttggactaaacccacccaagaggaaggacagccagttgaccaacgatgctaagaccccggcaaccaaacagggcaaggatagagcttatcctgtttgccattagcctgtaatgatctcgctaagggttgaacatgccattcataacgtgaccataccaaatcaacacccctcggaaagttaaggcgggtcacacggggtccatatgaagggttgcgttcttcggcaagttctcaaaaaccgcgtcgttacaacccatcaagtggacgagattcaagacacttagaaacatgtatcttcgtcttcggtcgtagaggttccattgggttcaaacctccgaacatgatcctagcaattaccgatatgagaacaatgacctcacgcgaaattaacggatcaccggtgttgtacctcgggaaaaaaactacccctgagagattgactcgcaaccagtacatgatcaaacgcacaaggcttggaccattagacgtcgaatgtcgaatcataaccaaaagatttccggttctttggtgccgaaatgaggtcgttgctactgtacattcggaaatgttgggaaaaacttgaatcggttcgggaccaagatcaggcttgaatccactgttgatgttaaagcatcatcttgcaattcggtgggattatcgggggatacttgcccaggtggtcaaatggtaaaagtccagtcttatgcactccacacactgtgcatcaatttacgatttaaaggattggcggctattccaacgccatggacactacgggggaccatgcgagtcttgcatcgcaaatatcatccatacactacacggctgcctaaactccgcagatagggatgatctcatgagtggtattgaagagttgatacagaagaccacccaaggctgcataattgcaacgtcggtggcagaaacacggttgcatgtgccttttccaggcagaagtcatgcgagcaaaggatggaagcccttggggtatctcatgtgcagagaactttatgtcggcggatggcattgccgtcgatgttcgggtgcaggttattagcggagaactggagatcaaaatttgaatgaactcccagaaatcccagaactaaagacataggcagactgttgcctggaaggttcaggtgaaaatggcggcacttctgccacatcggtaaggggatgtggttgaaaattctcaaactgacggttcgaccgcaaggtctctcgtccatgacactgacacgggtatatttcaactgccgtgccttgagcgcatcaaaaggcggcctcaaactgacgtgatattcgagggcacaattcccttctcaatttgaaataaccaaccattcaggatccacaccatttccataataaatccaccagctgctgccgatgcaagggcttggcgatgtaatcgtccatccccttcgccaaatacgtctctgcgtctcccttgagagcattgcccgtcaacgcaaggatgggcatatcgagtttcatccgtcgaatgtgctctgtggcggttaatccatccatgaccggcatgctgatgtccatcaggatgacattataggccaaaggcttctgcttcaccatacgcactgcttccgctccatcccaggcagcatcgacgcgcttgaaacccaggctgctgagaagttttaacataataagttgattgaccttgttgtcttcgacaaggaggatgtgtttgtgtggggcgatcttctcgagcgaggcggaattatccaatgcctcaggtatagccggttgcaatctctgcttcactgtagacactggcgaggtaaggcgagccattttggctgtcatccagaacacactaccgcgtccgtcgggattggcatggaaaccaaccgctccacccatcaattcagccaggctcttgcatatcgacaggccaaggcccgtaccctggtacctttttgtggccgtgtccgcgaatcgcgtgaagggggtgaagagggtgtttgaggcatcttcgggtacgccgataccagtgtccactacctgcgtggagattacatacatatcggggtccttttcatcgatggtataggtggcatgaactcgaacatgaccactctcggtgaatttcactgcgttggtgaccatattttgcagaacttggcggaatcgcagcgggtcacctttgaggtttggaggaaagcccgcgcttacatcgcccatgattttgacaccgggcttcagcgccgactgacaattccgaacgacagccgagatcacgtcggggatgtggacaacgtctgtgttcaaggggaaggttcccgacgatagcttggaataatctaggacatcgttaatgacctgcagcaagatagatgttgagtcttccaggatggatccgaattcccgctggtcatcagtcaattcggtcctcattagcattgtcaaagccaagagcatgccattcatcggggtgcgcaattcgtgggacatgttggccaagaaatcggacttgagcttggccgattcttcaaaggcgtcaatcaaacgcgcctctgtcgcccggcgttcagtcatgtcgcgggtaactttcacgaatcccacatggctgccgttctgatagatggcagtgatcatgacattggcccaaaaccggttgccatccttgtgataacgccagccctcatcctccagttttccttcttgtaaacagacctccagctcgcggacgggtttttttatttcgcggtcatcgcgaccgtaaaagatggagaaatgctggccgatgatctcggaggatgtgtatcccttcagaatagcggcgcccgaattccatgtcgcaatatggccgcgcgtatcgagcatgaaaatggcataatccctcacggtgtcgaccaagattttgtaaatttcgttgggataggcatcgtcgctgatggaattcgaccgatgccggtgatgtttgatccgctgggcttccagtagcatgtagatcagcgagtcatcttcaaagatgggtgtcacgctaagtgagaagaaagcgtcgacttttgccacgtgaacacgctggatgacctgcacttcgcgagttgatatggcagtgccaagagccccgatcagggaggcgatatcgggggctgggaggatggaggggggaagatcgtagacattcgctgccaacagttggtctcgtgagtgcttgaagacttccacatgactgttggacacttcgacgattcgcagagcgccgtctaaaacgagagtcggtttcctacaggggttaacgggaataatccatgctatccctccaaggggttcgggttctcacggtgtaaatcgatagatgcgactcaacgatccgacaacgggctgttcaagggatttgttctccagattcaagtcactctcggccggaggcgtgatcaccatcgcgacattgttcataggacagtcgattctcaggtggagcatctgatccacaggcatattgctaacagcctgggaggaagtgaggatgtcattcaagaagattttcagaagcaataaagggataaggatcaggatgatcagtccaaaggggaaaggctgaagaaagtcaagagggaaagttggggtggacgggagaaatgcccgggactggactttttccagtgcaatccaggccaaaggtggataaaagaagaaaaaacaaggtcaacaatgtccaaatgagcgaaactgatgttccaagaaaggcaattcgatctgctttgtagaactgaacttgtagaacttcatggatatcccctaaggtatatgaagtgatgtacgtcattcgctgtttcaccacatcgaggggcaatggaacggaaataactcggtatattgtgaatggatgaggctcgaagtatctgatatatgaacgatatgcttctacaagatcacagtctcatgctccgtccgctctaccatcttcaccaacgcatcggcaatcccatatgaaaacgcatacccacctcctccaaacccatacgcggagagcaccacccgactaccctttcgctccgaatccaaacggaaccctccttttcgggatggtcggatcccaataatgtagctcaccgtatctgcagctgggtgttcggggacaatttcaggcgctaaccgatgcgcgcgtgcaatctcatccctcgcgatatccatatcgacttcaggtgacctagggaggttagagtggatcgttttggagatgtggggatgtccatacagattgtcctgttgcttcaccccacccaggaccacccccttggatagaggccgaggaatcacataggtatattccttgccatttcggaagtgaagtgtgttgcattgatcagtggccagaaacacattctgccctcgctccggaaaacagttatcatcttgcacatccgtcaaggttttactgccccagccgcttgcattgatgaatatccctgattcggggaacatgtcatacagttcctgaagagactcgacacgttggcggataaagcgacccccaagagactcaacctgttctctgagataaggcatatgtctcgtaggatctgtaacaagcgtctcataggcccaggcacagttgaaattgggcgggtattcaccaggactcatctcgcggaactaaaccggacagaggatgttaatatcagtcaagcgggaagcacatggagtacgcattaccttggatactactgtcttaccccatatcgccgagtcaggagcaggtttttcttcgaggtattctcgtgcgttgacaatgctcacccctgcctcggggccatcttgtgccatcttgagtagtatgcgatgtgtgacagcttgaagataccgttgatccggagtaatacccccagcggcatgccacgctgctcctgcccaagccgaagcatagtagatattctggtctcccggtagatattcggccaccaataccacggggaaaccattcagcagcaattgccgagcagttgcacaaccaatgatccctgcaccgaggattataatgggtctttgagaaaagggcacctcgttggtatgaaattggtcgtattcacccatcgtgaggcgggtataaggttcaagtgacgaatgatatcagaggggctcggaggatgggaaaggggtcaggtcaacaacgttcagggtctcaaacttgggatccttcaacgcggcattgcttctgtttagaattaatcattcaattaattcaatcattcaatagcagaatgattttccacccagtccaagctatatctcactccggcaataattaagtgggtctataacggcctcttccgacgtcgcatgcccgtcagtccctttttttcccttcctatctccattcgtccccgttctacccaatcccattgaagagaacgaaatccaagatagaagtgatgtgctagatcccccgatgtcccttcttcattggctattttgttagctcgcccgtggacatacctgtacggagtactccgtatctggagacacttcatgcagccatcggtacctacggagtcgtcggtctgacattcggcttaagccgacttaaacactgtactgggtttagctgtggttccctcctttctcagcataggggaaggctcctgcagaggaccgggttcaggatggagagggcccagaagagccaggtgagtgtccacttctaagctgatccagatatatcatatcccccatatatattgttattaactgtttcacatctcagaaatccccttcagagcaagatagaattgacgttcttcacgatcgggatgccgaaaagatcttaccctatgaagccgatgattcgccttttcccgaggtgcgggctgtcatccagccagtcaatgacttgacgctgcctgttaacacggtccgcatgtggactattggtattttgtttactatcgtgagtcttgttttctatgcgaccggacaattggcaagataactaacgtcgacacaggtcggtagtggactgaaccagttcttcagcttacgacagcccagtgtgaatatcagtgctctagtagcacagttactcgctttccctctgggatgcgcctgggcgaaatggattccccttggggtcttgaatcccgaccggcatttcaatatcaaggagcatgccttgatcacaatcatggcaaacgtctctattggctctgctgctgccacccaaattatcgaagcgcttgtcaagttctataatatgccgtcacagggtgggtttgaagtcttgttgtgcattaccacgcaattgtttggcttcggcttagccggcatggcgtcgcgctggctagttggcccagcatcgatgatttggccgcaggtgttgtcaaatgccgcacttttgaccactctccattctcgctctaataccatcgcagatggctggcagatcacacgtcttcgcttctttctttatgtgttcgtcggtggtgccatctggtacttcgtcccgggatatctctttacgggtctcagcacattcgccttcatttgctggattgtgccattcaatgtggtggtgaatcagctctttgggcaaaccaccggactagggatgtcggtattgacctttgactgggcccaggtggtctatgccaaccaaagccccctgcttgttcccttctgggctggccttaatgtgatgggatcatttgcactcttcttttggcttgtgtgccccctcgtttactacaccaacacctggtattccgcacacttgccactgctcaattccaacaccttcgataatactggaactccttataacaccagtcgtatcatgggttcgagcgggaggatcgaccaaactgcgtatcggaactattcgcccatgtttttaccggctggctatgcaatcacatttggggttgcctttgctaacttgacgggcatcttcttccacatcgcgttgtatcatgggaaagacttgtggcaacaatggaagggcactagcaaacaagacgtccatattcgactgatgtcttcatatcgagccgtaccctggtggtggtttgctgcagtaactgtcctgatgtttgtcttgagtatcgtgaccaacgaggtgtggcatacgggtctaccggcatggggtgtgcttgtggcattcgtgttaccagtggtctactttatccctgtgggagtcatcaaagcgctcacaaatatcagtagtaaccaactgaacctgctcacggaattcattggcgggtatgcattcctcgggcagcccgtggccaacatggctttcaaattctatggttatgtcgccgtccagcaaggactcgagtgggttacatacctccaaaacggaattggcattgattaacatcatattagatttgtcgccgatatgaagttggctcattatatgcacatcgccccacgccttctgtttgtagcccaaggccttgccacactcatcggagctatcgttcaatgtggtgtgacagtgttcatgatcacaagaattgatggtgtatgcacccctgaagcccagggaaatttcatctgccctcatggaaaggtcacatattcttcgtctcttatttggggtgagttccatcttattgtcgatgttctaccatgtcatacctaatcaaccttcaggtgctgttggtccaggtcggttgttttcttccgggcagatatatagcaatctgctttggtttttcctggtcggacctgcggtggtagtcatcacctatcttctaggtcgtcgttggaaagctgccaatcatgtctcctggcccgtcgcttttggtgcaatgagtctagtcccacctgccacaggtatcagcttctcctcgtggtggatagtcaacttgatattcaatggcgtactccgtcaccgcaaacccgcgtggtggtcgaaatacagtatgttcatggtttccctttcatcgttgattcttttgctaatcgtccgcagattatgtactatccgccgcgctagactgcggcgttgcagtcgctacagtaatcattttcttttgcataactctcccagctggttcgttgaactggtggggaaatgctgtgtcgaaaaccacagccgacggcaaaggcacgccctacatgggcttacccgcgcatggctactttggccccccaaaaggaacttgggagtgatcaggaatgtctgctcggcctcattttagtgtgtttctaccatatattgccgtaattaccgtttgttgggtggactttgagtatcgcgtcagtccagcagatccggatgatcccacagatatcaccctcgccgccctcgcaacttgaacaatttgggacggtcggatcgatgcttcctttccatcatcgatagtcaaaatcagtttatcatttccgaaaccgcgacgtcggtctcggtgctaagtaagacaagtatctcccgatatggacattggatctgtggggtgccctcataccatgaagttctcacctcaaaggattcttcgaaacatcgagaccgataacatgactataatgaccacgatcgataccgctatgtcattcgcgattcacctgtttccttcgtgaatcgtctcccggaaaggggtcattccgatcgaattgtcaacgcgaggagcagctgagacaggcttgtgtcccaaccccgtaattattgttttcacatgagtgaaatttggctccagggctagctgtatcatgaggaatttattgtcatgcccatttcggcctttccgaacgcgtttattgctttccattcccagcaaagcccgacaaactcagcattaccaaaatcaaattcgcggctttctctgcacggctgctcttatgtctcactctcccaaagatgactcctcgcaacacctttatgagcccatcgaaggagtggaaaaactggaaagctatcgcgtggggggctatcactccatgacgatcggtgatcatattcacaatcgctatcaggtggttcataaactcggtcatggcacgtactcgacgatctggctggcctgagatcaaaaagatggcaaatacgtcgccatcaaagtgtgtaccgcggattcgaacccgcttgaattcagcgtcctttcggaactttccaactcgcaacaaagttcaactgctagcttgaagacaatgataccttcagtattaaatagattcgagattaaaggaccgaatggtacgcacgcctgttatgtgacagtcccggcaagaatgagtctctccgaggcaaaagatgcctcatagaaccgccttttccaattggaggctggtcgggccttagcagcacagctattccttgcagttgagtacgtccactcccaggagtttgttcacggagatcttcattttcctccggttgccatttgacctaggccaactttctgtggagggtttgtacaaaaagtacgggaaccggaattcgaagcagtaagacccttcgatagtcaaccgcttccaccgaatatgccatcacgggccgttttaccaatctggctgggtgaggcaagcgataaacttaaattcccagaagccaaaatcctactcggcgctctcggtgaagccttctctcctaccaagcaacagaggtttgagtcgcacaccccgcttataggccgaccacgagaggctcggttcgaaccacacaagcctctgtccttcccatcagacatttggtcactcggatgctctttatggaacatcataggtcaaagctcactttttgacggcatgtttgcaaccgaagatagcatcactggtgggcaagtcgatgcactaggtatgctacccccggaatggtagtacaaatgggaggggcgacatatcagattcaccaaaaatggaaagccgatcaatcgggacccttaccggtcgtggggggacagatttgaacaagatatgcaggaacctcgacggaggaaagggatgctatttttaagatgctgaagtcgatgcttcaattcaggcctgagaatcgctcacctgcaaagcaaattcccgaatgtgaatggatggtcaattgggctttacctgagtacgcgaagattcgaatgatatgagtactgtaagctctctggattctctgtcaatatctaggtatacaggagtcgaaaatggtcttttggatacccttgcagattgggctacgggggggttagcgtttatcttcacatcgtagctcatgaatatatcatttctcatttctcatttctcataattcaagacaggccatcaaactttcactgaacgtccgctcacatagactttcacaatattccggtcatccccagtcatcagaaacttctcaaatattacctggatagtatcttcatcttcaactgggctcatcactcctggttggccaagatccgtggtatgaacttcgagcgcatcaaactctttgccaactgcaaagttaccgacacggtcatcgagaccacacacttgcgctccacctagagtggcaagaaagaaggcctcgggcaacgaaagtgcagggtctcgtccttgggtcaacttctgctgcgcattcgacacaatgaaggcctgtttcatggcatccaatatagacgacgagtagccaccaccactatcagtgcccaggcccaccttgataccgcgacgcaaatactctcgcacaggtgcgaccataaaatcttccatggtggtattggcgattgggcagtgggcaactccacagccaagttcttggatgcgacacatctctccttcttgtagaaagatacagtgggcaagaatcgatcgattattcaacagaccatatcgctgatagagatcagcttccgtatcaaactctggaaagagctgatgcgtgaactcgatttcctgcttggcttcattgaaatgcgtttgtattggaagatcgggatgttcacgggcgatggcaccgaccccatccagtaattccggctcacaggatatcgcaaagcgtggcgtcagtattggtttcaccaggcggtattccggatcaagtttctgaatatgacgaatgagttcacgtgtttcttgcaatgagtcggacaccgacggatcccgataccagtccggggcattccggttcatattgcacttccccaccagagcgcgctgtcctttgtcaaagcagacatccgccaagattcgagttgcctgcccatgatgtgagccgtaatatgaggcggtggtaattccctgctgcaagaagcccgtcacgcaagaggagtacatgcgtttggcatattccggatcttggaacttggcctcgtgggcaaaagtgaccttattcaaccagtcgagtagggaaatccctcttccgacgccacgctgtgcccactggggtgcatggttgtgagtatcaacgaagccgggacacagaaattccccgcgcctgagatacttcactgggaaaacgtcggggacatggccattttctgaaagaatagagttgatctgatccaattccacatttccttgtaacgcctgaatcttgccatctgttcccacaatcataatgcaattctccaggatctcgaagtcatccagacttcgggaatggattaccgtgccgtggaaggcgaggggcagcccagagaccggcgtggcgttcttgtcgagctcttccataatacacaataagatgatataataatcaccagggattatttgcgaatgatgggtgtagttctgtgaaatgtaggagggggatagatgaagataacaggtttggaggtgaggggcattaataatcggcatatgctgagatgaggtgaaacagcctgcaattgtgaagctccttggcagaaatccatgagcctgctattcttcaatctaaagagtctattcctttcaattaagtgggagtcttgagtttgtatcaatccatcttcatctctgtctaggtcatcacgaactatataaaacattaagtcgcaggtactaaaacgattcttaatctgatgaatctggtatgcttttagttgcgacaaactaatattgattaacatgaaaggaaaaagcctggcccgatggaaaactccgtctacgtccggtagagcacggtttgaatatagagaaagagattcgttcaaagggtatagtatgatgccatctcctcctgaaaccaattgtaggagtagaagagttgttccgccatctgtggatcgatcatcggcacagtcccactcccatccacgagcaacacgtcatcgagaactggagcgagtgggactgggggtggagggggtgcggctaaagacatcggatgagctgggagcagtgcaaatggtggaggcggtggttgcggttgcggttggtaatggtgttgatgttgtgggtgatggtgatgttgctgctgttctagttgctgttgctgataggccatttggctgaagatcactgtgctctggtgccggaatgtctctgccaaccggtccaccccaggccgacgcttgccaaattcttccaacagtacgacaacggcctgaataccacgtcgcatcgtctgctcttcgggatgccagggggcaggctgagagtcgcgtaatgagcgggcattctgctcaaggcaccacaggatagtgataccagcaaaataaacttgactcaatgttaaccatatccattttagcttgccgactgagtagctgtcccaataggatcgaatgacttggatactagattcaccacagctgatgatactggttatgtcgggcgtcggattgcgggggctggggcggtacatcaagagaagcgttgtgtaatagagataatcgtaataagaggtagaatagagaagtgccgatgggtatactggagctgttatgcgccagtcatcaacctcatggcggaatcgactaagtgtggcggcagcttcttggggacacagtcgtggcaggctgctatatactacagaggaaacaattagaggaaaggaaaaaccagacgaaattctcaagacttcacttacagtattgatagatgcgtgaaaatatccgccgcagacgtgtcacctgcaagggaatcgtcatcgcgctcgcgccaggggcttcggtttcatcgtcattgagttctcgcagaagacccacgctaatatcgtcgtccgcaattcccaatggccgacccaaggtgctagcgataaggcgatcgagattgtaaagactccaaaacgcgcgctttgccatctcctcctccgcaatgctagaataggaccgtgttttgtgcaaacccatactaattgacagcctcatcgtcacacccagcaaatgccaaatgctgggaccagcagtcgcaaacatagtatacaaggacaatcccagcagtgcccgcacagccggtaagtcttcattttgcaatgccagtggcagcgtctcctggctggcatggtaaaattcagctgcctggatcggatccgcagacccgatcaggagggaaatggcaatgacgatgtgataagaatgatgcgtttctggagatggaacaccaccggtatagatatggcgcagattggccataaactccggacgagacaaaaacgggtactggtatcccatactatcgaaatattgtccagccagccgttccgcttcctccagcgacgacaagcgcataactcgcggggcggaggaaggtcgtgcgaccgacggtcggcggtgctccaactgatcgcgaaagatctcgccgatgttggggagttcggtgcctactccagtcgaggcctccgagggtcctgcagtcaccgacgaaccaccactgccggcagggcttggcattgaggtggcacgattacccccggtcgcaatcatggcgggcacctgataccaccaatccggatctccctcgccatcgactggtgttcccgtcggcaattccgctaccgagaggcccgacttacggcggacgacatcctccaaccatcgtactcgtttttgtaaattctccagctgatctcgggggacggaggcgctagcgacctgaggaccgggtgggggtatggtgcaccggactccggcgcgggtgcaagcggaacaattggggtaacgaaagtcgcatttcttcttccttttgcgacaaaagtcacaggccgtcgatactcgtttgctgcgagcatgactcgaaacatctatagactcatgatgaaccggcggtggttgagaccaggttggagtgtaagtattaatcgaatccaagcggaattttcccagctgatcgcggaaatccttgtttccagacgtgctcatggtcaggggccacttaagctatccatttcccaaacatatcgaccaattgtcattgaaggaaacgcacgttcatcgaaagtgtactttagtgctgttgaagaagggaagatatgaaaagtgggggggccccgggttactttcgcttacataggcgaaacgctgatctgtccatggccgaaagagttatcattctgcgagattgtgactttgggatgattctattaatctatatggggcacggggtactacctaagtatctctgcgtttatatttatcgagaatggctgggactatctcaatatccctgtttcgtcaggcttatcttcaggaattagggttactttgcatttcccggtctctgaagacattgctgcagagctggactatgaggtcgaggatcatattgaaaatgtttactgatcaagctccaggctcttcaatctgatatatccctatccttcttaccggatccactgagccgtgccaactcccgggtgctatatacgagccgttgaaacagtaaaacaacatgcaggaactgatctacatagtacatacctgaagtgggatgagagcaacattgaatggaccctcatgtttccactatacaacgttactacagcactgcatgatatccccgtgttatttgatggtccccgatgatgcaactacatggagcttctttgcctggaaaacacataaataagccctcagttcccctcccaaaatcttgattaccgatctcaactcactcaatacacttcttcattcactgtccgagcctcactctcgctttcaagatgaagtttaccgccatccctctcctgtttgcaaccgctgccagcgccaccgtccagggcttcgacatctccagctaccaacccagcgtggacttcgctggtgcttacaagtctggcgctcgctttgtcatgatcaaggtaggctttcccgaattcacaaccgttcccttctcagtcccaatactaactatatcaggcaactgagggtaccagctatacctccagcactttctccagccaatacactggtgccactaacgccggtctgatccgtggtggttatcactttgcccagcccgccagtagcaccggtgccactcaagccaagtacttcatcgcccacggtggaggttggtccaatgacggcctgaccctgcccggtatgctagacattgaatacaacccatccggcgcaacctgctatgggctcagccaatctgccatggttgcttgggtcaaggactttggcgagacctacaaggctgccgagggccggtaccctatgatctactccaccgccgactggtggaacacttgcactggtggcagcacggcattcagcgcggactacccgttggttctggcttcatacagcacctcggtcggcactatccccggtggctggccttaccagagcttctggcagaacaccgattcgtatagctatggaggtgattccgaggtttggaatggcagcgaagccgctctgcagacctttgccaagaacgcttcttaaatggagccaattggaccgagaatttcccacaagatgtatacttgtatgtatctattggtttttgattcgttttcagatacttgtgcagatcacccgttcttgcctctttgattgaacggcagtggaattgatcgtttttataccttcccagacgggctagcagctcggaaatgtccgtagatttcctagatcgctaatccttgtaaagaaaaatgaagggaccattagacaataaacccgggagctgatgtagaatgtgtgtcttcttattggctaagccttcttcttaattaggtctaatttcaacaagtctccctcggctttttacgagtcgccccgagttggaatccgataccggacctattctaggcttcgacagttttgacttacagtaattgagggcaggttcatgccactaccaaataagcatcataggtaaaaatgtggacagttaactaaatatctagctactatgtcgttgtgactcattcttattcatcatgacggatccactccggcgctcggaaaggcaatgcaactatacggggtaggcatcgtatacttaaatcgttacttgtctagacaatttgcttctaatgcgcaccaaagttccaagcataatgtcatatctcattttaaacacagatggctttcttacgaaagatctttctgtcgtatatcttctgttgacagccctcttgagcttccttgttgtcctcgcatggcgtcggacggaaaaaccgacaatactgattgtcaactcatactctggtgatataattttaaaagaggcacagtcgacattcatgtcagatgccaggagtttgatcaaagaaggaatccagaaggtaagttgaagcttccatgacaaaaatgacatgacactgcatctaatgtacacgcttcagttcaacggaccatttcgcatcataaccactcttggctctcggttaattctcccagcatcatatatagagtggctgaaaaattttccggatttagatcatcaagcgcttgtccacgatgttgcagctccctttactaacgcagggtgggaactgacgacacacgatttcatatagcaatatttcgcggcataccccgggatggaaggacagagattggtcactgatcccagaaggattctgatcaatgtcacaaaaacgaaattgaacaatcagagcagtcgtgggtgacagcctcagggcccatgatgcacgttgggctctgactaacatgacctttcatcacagagtgtgggctgcttcatgaacatcttacggaggctcttgacaagacctggatggatcacgatggtacttttgctctatattttgctggaacgtttgattaacttattcttcagactggcacaccactgattggtctcaacatgcagtcggcttcattgggcaaatgtcagcatctgtttttgtcggtcctgaattagctcgtgatcctaagtggcaagacttaattatcacttcgacatgaatacctttatggggattcgatctctccgcgcctggccggcgtttcttcgtccatttgttcattggtttttgccagaactccgaaagtgccgccagcaaatgcgtcttgctcgtcttatgctacagccaatcttggatcgcagggcgcatgagcaatctcgctctattgagcctggtgagatagaaaaattcgaggataccatacagtggcttgaataaatcgctgccggacgcccctatgatgccgctgcggcacaaattgcgttcgcgataagcgcaatgcacacaacttctgagctactcaagcaggccttactggatattcgtatgcacccagatctgattccggctctgcgagatgaagcacagaaggctgtcgaggagagcggatggacaactgcaggcgtcttcaaaatgcagctgttggacagcgcagtaaaggagacacagcggctcaaaccgggatcattaggtatgtgtctaacccatcagtactctcatatcaaggtactgaactcactctctcacagtaaatcttgagtggaaagcgctgcaagatgtgatccttcccaatggcttgactatccctcgcgggaccaatgttgcagttgattcatccatgatgtgggacccagcgatttaccccgatcaattctcttatgatgcgtaccgttttcttcgtcttcgcaactccggtgatactgcagcagcacttgcttccatcagcccggagcacattgcctttggaattggcaaggcaatctgtcctgggagattctttgctagcaacgaagtcaagattgctctgctaagattctcttgacttatgatgttagaattgctgaggggatgatacccaagattgtggcgataggatttgaaatgctaagtgatccaaaagcaaagctagaggttaaaaagcgaagggtttgatagaaaataagatttgaattggtactatagaagactataagactgtaaataaatttccaactgagaggggaaaccctgtaataatacagtatattaccactaggccatggagggggctgatatctgttctgtttgttgtctgacagtctcccttcactcactcatatatcttctgcgggactaccatggatctcatcgaatatgccaccgaggccgatgggccaggacttgccaaagtcaacgtccaaagctttcaaggccgccgtctcctcgaagaaattttcccagaggccagcttgaccagggtgcaggaattcaaaataattatgggaatgaaacatcttgccaatcccaatatgcacgtcctcaagatccatgatccagtcagtggggagctggcgacctacagccgttggcagtttccagcatcatttggtccaagcctggttaccataagtgagaaggcagccttgttggccaaggaccccgttccacatgcaccaagaccaatgaatgaggaggttttcaatgctttcaaaaggctcctagaggatggtcgcaagcgatacaccacagataacgacatcagtaagtgacccccacattcgcgataggggtttttgctcaaatggttcatcagtcctcgatctgctagcaaccctaccggaatatcaacgacgagggtttggttctgctatcttgaaatggggcatagaaaaggcagatgcatcccagttgcgtatcttcctcgagggtacgcctgaaggtgttcctatctacctcaagtatgggtggaagatattagaggaggtggttatggattatacaccatttggaagtgttgggcaagagacctttttcctaatgatgagggatccaattttacaataagagtgcagggttcctataaagttgctcaatctactttggagattaatgtcgacataaggtacatttaccaaactgaggataggcttgaagtacatactactccaataccttcagacatgtaaatgtacatcgtactgagtggataaacgaactgccgggcacgtcatttccccagggaatttcctacacttccccggacatactctctcttccctctttcgctcccatattcatcttttacaatggctcatttcaagtttgcaatccttgacgattaccagggcattgcgcctgcctatttcactcacctcgagtcgcgagttgacatttccagttttcccgaaaccctcgatccccgcgatcctgcacaacacgatgcccttgtccaacgactccttcccttcgatatcatcttggcgatgcgcgagcgaacaccttttgcagccaatactattgcagcgctcccaaatttgaaacttcttttgaccacgggtactcgcaatctggcgctagatctcggggcatttacacgttccaatgtggctgtcgcaggcaccgagggtcgcccacccggtgtgaattcgacggttcagcatacatgggctttgatcttgggactagcccgaaatatagcacgcgacgatgcagccgtcaaacgcggtgcatggcaaggttcccttgggatcaacttgtccgggaagacattagggctgcttgggctgggaaaacttgggtcgcaagtaggaaagattggcgctctggctttcggcatgaaggttctcgcatggtcaacaaacctgacacaggaaaaggccgacgagcaagcgcacgctcagggtctgccagtggggacatttgccgtcgccgcgtccaaagaggaattcttcgcccaggctgacatcgtcagtgtacacagcgtactatcggatcgaagtcgtggaattgttggcgcaactgaaatagcaattatgcaaccgtctgcatttatcatcaatacttcacgtgggcccttgattgaggagcaggccctcctcgaggctctgaatgcgggccgcattcgtggcgccgcgttagatgtctttgacccggagccattacctctggatagcccatggcgtaatactccctggggccacgatggacgcagtgaagttctgctttccccccacatgggatacggagaggaggagctattgcgggggtggtatcgcgaaacagcggagaatttagagcggtggttgaatggacaggagctactgcgcaagatgaattgatgaccatagctatatcaatacaaacaaccgaggttgttccgagaatgtcatgttctacatgtggaggttcaccgaatgacgaatacgtacgatccggctaacagttcgccttcacaagtgtaaacggtcaaaggtcttcgttaggactcttttggcaagacaattaattgcgttgtgcctcggtcttccgagcggaatgacctcggttgaagggaacgatgtggaatgttctcttcatcgctactccgtacgtcttcgacttaataaaaccccccgcgatttccactttttaattccaaacatcttcttttctcctatcctcttctgttctcctctattaccccctcttcccttctcatctccatacctccctcaccatggccccatccgccgatcccattcccgcgacgcccgccattgccaacttccctcctccgacccatcccgaatgtctgcgcgttgagcgcagtacgaaggcatttgctagcggagcttattctctcgtggacctccccgcaggtgccgtcttcgccaagatcactacggccactcccggaaagaaagcctacacgagcgtgcaaaccggccgcgacacccacatcgaactcaactccgacctagtctactgcaaccactcatgcgcaccatcgttggtcttcgatatgggtcgcatggaggtgcgggtcgtggacgaccatcctttgaagaaaggtgatgcccttaccttcttctaccccagcaccgagtgggatatggaccagccattccagtgcacctgcggggcaggtgacgggatctgcagaggttggatctccggagccaagaccatgcccgccgaccagttgaacggatactggcttaatggccacatttccgaattgttgaatgagaccaaggccaattgaggggctggcaccccaaattggaggcttatagaactatcgaacaagacacaagatatccaaatatccgatagaaaaatagagattagcgttaagactaaaaaaaaataccacacagacgctctatactttcataacactcccgcgatcattgcaagtcggtcaacctctttcttcaacatcatcaaacaagtcgccacaataaccgcgtcctccagttcaagagactgtgacgcagcctcgtcgatctgcaattcacccccattgcccgccgaagatcgcgacgttccgggcgtccgagcatcgtctccgcgggccagctgtgcaatcctgtggcgctgggtctctttactcttggccttgtcttcccccacggcacgaagaacaatcaaattgactttctgcccatccgcccttctctccttggcatatttccattcaaactgtgtacctccaggtatagcaaagcgcattgagcgagaggtccatttccccgcgacagccacttcctcggggctgtcaccagaaggttgaagcaggtgcacaacgggatcccggctcggaccgaacgagtactcagttcggatcagatctccgcgttcggggtgggacagggtcgcattacctgagcaacgtttgtcgcgcgtggagacgtaagcctcggcgccgtctgggttgtagacaaagatctcagtctggcgggatggcagtgggagacggaaagcgcgaatgccttgggcattaatggttagaatgcgcgatgggtagaaagaggatggactctcgataagtgttcttgtcgtgctgttagacctgacagacaaggccgaggagtgaatctccatttccttctgaggattgagcatggctgtagtgttcattgtccacgtctggatgaccaccgtgtctccatgtatggccgtgtatatatgttcttcccccgatacgacactttcctatttgggctttgggcgacccatggttttcccaaacttaactccatttcttggcgctcgtgctccatgacgtcggagatcaccacttccttccttctctcattcgctacttctctcgctgaccatgtctggacttgctgagcctcactcgtatagcctcttttgtagttcctacgagtcccaaggcgaaagatacgatctcatgactttggctcgaacgagaaccttctattctggtggatgggcagcgatggtaatgtctgtcggctcccaatacgaactgccgtcacccggtagatggtctgagccgacttacttcgcaattgcgatcagcaagtccgccaagctcctttctacctttctacaacttcagaagagaacagtgaatttgatctccgatctcttgacgcccccttcctaatggggtatttcggacgaggatccactcccaacagtcctagcactcgattggtgtccacacattacgcctattattggtttccgcttgtcagtcgctaaccggcggtctcttccatccaactgggcttgtggtttagtggtataatactcccttagcatgggagtggtccggggttcgattccccgcgagtccatatttttgcttttgctatgttcattttgttcagctcatgaccattcggctattttggcatatctatatacatctttcatctttctattatttttatcttccggctggcaacaatgccgctgtatctacattccaatcacactcgggcccaaacctcttgagccgtcagcagtgtactcaaaaccatggtcgatccaaccaccacgtccccggtgggcatccagcccaaaagctccaacgggatgagcaaatcacagccatctaccacgatctgcttgacccgggcagaggtaacagttgattttaccggggtcttctcggaagcgatcttccggttctttctcttgccattcttcttagaaggctgctccgcgggactgacaagcagtgcccaaatggcttctgcaacagagaaagagagcgcatataaccaaaacgtattggcttggttcatgacaggatcattccaggtcactgcgtagacgcccattgcatgaagctagccttcgtcagtcctattcacggaggaagaaggaacagcagtaaataacataccgtggtcaggtcttccaggacaaagtaaaggccaaagcaagtgcatttggctagttcaagcagtccagccacagaaccgaagccatccttgcccagcaacgccaacatccgctggaaggagtcaatgaacccaaagaagcggaaatatctccgcgctacgcaacaaacccagtatcagtatatataacagtatatatctatcaatccaatatagaattcaacttactcagtgccaattgcagcttgaccgtggtcaattgcacggccaggacattgctcacggtgagtgctgcgaccacctgcgacacgcattggatcagacgaagggtcttttcaagaccagcgcccgatttgacaaagcgagaaaagtgttggatcatcgttgtcgcactgccacggactctggggacagtatactcttgtgggataggggtggaaattatgtgtcaaggcttggaagtgggctaatttcacttgcactagtaaagttgcttattcagcctttgcatgttcgaagattagtatgggttaactttacgtgtagtcggctattgattgttgtatcgaatagttcatatgggtattctgagcatgatcgaagttagctggtggttgtggttgcatgctggagatatatatagagcgacaagtccagcactacaaaaaatttacaaaaaatttacttgaaattgaaacaattgacaagcaaataagacaatgctcgcaaaatagtacgttgatatcagtcctcagccattcactcgagcaggttcatcaaaccacccactcgacaatagttccaagtctgctctaccgtcctttgccgcccgagatatcctgacccagacgatatccaccaaccttctcccactccactttctgtcgtgtaatgggaagctgcctccggagacccttgaatacgccctcggatgtctgaacaaacgcccgattcagcgcttcctggtaatcgcgctcggccgcagcaatccgtgaaacaatcgactcggcggacacggaagggatgggaatgctgataggcttagtagtattgagggccacattgccatcttcgtagtagtgcacgtcaacgtggatgttgccagtcagggtagaggacgaggaggagacggggagttggtaaattgcgcggaaacgaccattcctattgtcctagaacagacaatcctccccagaaggggaagcgtccataacgattagcttcccaagatattaattgtagagatgtaaccacccaccagaagttgttgggggagtatcggttggcgaccaagacgatggcgacggcagagtcattctcaatagggtagacaccatacgagcagttggggtagtgttcgcgggcatgaacaccgaacgacttgagtagcgatttgctaaacacggtaagcggagtaccaccaagacttcagccgggatcattccttacatcaagtcggcgtgctctgactccaatgcgtatgattgtgctgccgaggctgtctattgccatggtgcaaacccgtaagccttcaatgtatcagcccagttggtcaggcgaaacctacctgtgtggtgtggtcgatctcaaacgaggtttggctctcagggtcgaagtagcggttgtcttcgagctcgttaaattcactaacaatgaccttcccagcaaacttattagctccaccgcagacatagttgactcccaagcgacacccacctcctgacttgatcctggcaatttcaccgttgcgagctgcgcctcgttgtaccgtttgaatgcgggtagaagagaaggaatgatatcctcgccctcggaagttaaggcttgcacatctaatcaagtagtagggattagcaccgtccatgtagatgccgggattgcggggatcgggataggcagcgtagggctaagagggcgatttaccggcgacaacatctgcgagctgaagaaaacatgtcagtgatcattcccaagcttcaggcagacgttgaccaggggagtgggggatcctggatcattgttgtgcatacctctcctggcggggcaccctcgatgaaggaggatgccaattcaacagtggaagccatggcgtaggaaaatacgatcggagtatttgatgttgagcagagcaagaggttcaagagcaatccaagtcctcgagtaattctagagctgggaaatggtgattgtctagagtctctgcggagagaaagacagctgtcggaggcggagagcgataagcacgtggcctactatacatccaagactatgtgcgtatggacatcaacattctgtaacgtgaagtgattcgtaaaataatgtgccaggtatctgaaaactcgctggaataacgaatgtgtatcttgcttcaaaatatccatatccaaataacaccatgctcttaaaacctttccagaaaaaaaaacaaaattctcgagcgctaacgaataatatcaaattccgcatcgctgtaataagagctgttttcaatcaatgctcatattcataaagccatcgctggcttcggtcatcccttgcaggccgacgcgtttcgcacctccagcatgagcaatcggtcgattgcccacatcagaactgagtctttcagagaacggtggcccgaggcccggctttggcggcggaccccagatgtttgggcccgtgtcactgatattatgggagtgggtcatcaccggactactctgagcactcacgctgggtgaaacagcccggcgcttgaaaagattaggatcgaagtcatcgtcacgacgccgcttgcgacatatctctccaatacttggcatacccggagcatggggcgtggaagagcgggaacgctgcttgaaagattccgcggtgacagagcccatggtcgtagacggagtcatatccataaacatatcttcatctgccacagacgagggacctccctgacgaaccgggggtggggttcggtatcgtccatcaaacgagttccaaaactcgaggccacccgagttgcgacaggcttgcttgccaaaagtatccgtagatcctgtgtccattcccactctgaccgccggatcttctgttgccgtcgaatccaatgaggtcgagggccgcaatgatgggaattcgccgagtgcaggggtgggttcaggttcggtgtcgcggacttgccggaccacttctgcttctcgtttcatatcgctatcaactggagcaccctcctccatcagagcagcacgaatgcgcgcaaaggtcttggttttgggctgttactgtagttagcttctagaccactgaattaaaggcacccacttacaagtaagctcccacgtcgggtcaccgcacgacggattacccccagtggacctccaccttccgggcgtggagtgggaactgggcttccgcttcgcgtcgtgcgactctcactatcgtcgctcatatcggacaaacgtaggtcgcgtgtgccaaagctgagactctctctgcgtgaatgcgcagtctgccgtggagcaaaataaccactagagtgctcgacactcttcatgatgggcggagagtgaggggtaggactaggtttcgtactgtttccactcgcactgctagagctgtggcgactacggcctttgcgaaagcgcgcgcgttggaaactcatcaagctggcggcagcttgtgaataccctcccatccagtcgttgccagggctctgcatattgctggcaaacggactcggcgcacttatgcgagtcgcctgcggcgtattgatcataacatcgtcgcgatcagccatggactcatcctcttcctcgctactacttgtgtccgactctaccatattcacactcgacatggagcttgagattgttgcacggtccgccggacctgatgttgaaaaaggcggaccggatgtcgctccaagcgatccgcgtcgctggggtattgccatgccccgccctccaacggtgggagatgaatctggggacgactcggctagggtggaatggtggagattcgtacatgcgcgtgagaagtcgaggcctcgagatcgtcgagggagaacagatcccggagatccgtagatatgtgatgggtcaagtttaggagagagaggggcgcagttcgtaagtgatgacacggcgggtttggaaggcaagtttagcgagaggtttgaataagatgcatttgatcttcgaggtgttgcggggagaacgggtatcgcattgtcgtctttgcttgatgcccgactgagatcaccagtggatggttgagtggaggatgtaggtctggaagcatcggataatgaacgcgacttgggagaacgcgacggttcaagttggtgttctagatcagtttcatggggttgagataattgttgactgagcttgctttcaaacccgtgggctgatgtactgcgccctggcgctggaggtcgcacctgcgccatattcaagtcactttggtctgatatggcgataaagagcaagggtgcacgttgaagggcatcatttgtcggcaccgaggcagggaaatccggtcaattccacaagtaatgcccggagagcacatgcgctgtggttaatgacagaatatccacagtattcggatcgaggcgaggtctacattgcattgcaagtcgctggctctgagcggttaacgagatcagatgacgtgcgctaacccgatccggccaagtcgcttctgttacggagtagtgacctacattatacaatcgtatacttcctatgtgctacacaactgaacagagaaatatgaaatcgatagttcaatgctttcgaatgaacgaacagacattccacatgctcattctttctcatgccctcacgccagactcatggcattgctgattggcaccacatgccattcccaatcattgcattgattttgcagaacgctccccttgatcaaatccgaatcgcgtgtctgccatagcttggtgatcactgcccgtgttctagcaatgttcgagatcgttgaatcggccattgttgccagggaacgtagcacaatcgctcgtcccgactttgattccatttccgattccgggaagagctcatcgtcagatggatcaagctccacggctgccacaaagactggccatgtcacatttactagcgatttacggccaaggaggtccgatatgagtcgcagaatctggcgcacataagtcttcaccaaaggtgtggtgggaccagccccgtacagagagcaatgtaagtaaagcattgcagccagccgcttagcatctgcaaccagtccaagaatttcgtcagccttccccatctcttggactaagttctctagttggcgttcaagggatgctgcacgtagtgagaacgacgccttgtccgcatcagacgtatgttttctccttgttcgactcatatctgtgattttggcgaggattgacaccaattcaggactgcatcccatccaaagatcgatgttgtgttcgtccggtttccagtagtcggtaccaaacaagacctctttggcacaggcggttcggcccatgacatcctggaaggcaaaaaattgctctgcaaagctcgtcacaggatccgatggggctgttgactgcaataatgtcatttgctgttttcttcgcagttggattaagtcgttggcgcctttgagatggatgatccattgttgatcacacttgtcgactatctcgtaaagacatagcatgatcatgataaccagtacttcggggtccatggagcatgtcaagcttccctctgacgagagacgttgacgaaggtccctcagagtctctgatttataacgcaggccgattgcactatagcttggattgagccttgaccagtggcatgcgcccaatgcttggatggccttgaaaagcgtaggagaagccgataaacacaatggcagaatcacagagacaaacggcgaagataatgtggagctggcggttgtgcgagggcacacttgttgaagatagtaatcaaacagctctccgtgcccagatttggatagctctggaaatagcgcaagagacggagggaggctggtgttgaaattcatgctaaccccgctgagatgtgagaagttttgtaaccaggaccatatttggtggtttctggaagatggtgagtttgagcattgggtaactgaaatcaatgcattccactcgtcgaagtcaacgttcacttcgtctgggtgtgcaaaagttgacacaccgctgtttatgaagccccaagggctaatggttggcactgggcaccactcgtgcgtttccgaaagcgagccgtatgtaggttgatttgcgccggttttgttccaaacacctgcacgcccaaaagccactccccgactgatgaattccggttcccatttcaaaactaaattcttcgtacatggaaatcctttctcctggcagcgtgtgcaaaggggctttttggtgtcacatcggacacgactcgcccgacactctttgcaaccatcgcgagatcgggtcttcaccggacctgtgcggtctgcagcttttcttcgtggcatacgagttccgtatatataaacttcacatggtatgaaccagcctgggccaaaaatagtatgtgaggtgggtagttggagttggtaaagaaaattgggggtggcggataagcgttggccgccccgccgaatctccaactgattttcgactgtcactcctatatccgtatactatgatgatgatgtgtataggttacatggaaatagtttgaacattatccctaagcgtgattctttttccactctgccgcacactcgccaaatgtcacaaattcaacctcccgctgtttgagccacgaaatcattcgatcaatcatcccaaccacatgagccattccactagtatctgggtgcagcaccaaaggaaaaacaaagccttgctcggaatcttcctcgattgatttttcgagagcctcactgtagaggaattcaaaccgcgacttccaattttgctcaatggtgatcggactaacgaacccgtgcgagttttcggccgctggaagaaactgcattggagtcatgtcctccatataccaattgcacggaacttcaaccaaactccgcggagttctggctgcaggagcggggaggggcttcatccaagtagaagcagacttggaaggcgagaagtcaatggccttgggctctgacattcgagggacaaagtacaacgccgaatcatgatgcgtgagggatgaatctgtctgaattcagtttcctgatagtcacatataatatgagcaaagtcgtataccgtataaaaatccaaactcttctagaacttgaatggtgtgtgttcgcaactgatataatggtgctctccatcctcgaggttgctttccagtcaagtcggttgccagctgcacacatttggcgatgacctctctctcctgtgactcagtcatttgactggagccctcgtgcgcatatccatggcaaccgatttcagcgcccgattgaacaattgctttggtctctgctgggaatgattccattgaatgaccggggacaaaccaagtcaccgaggaactaattccatgtttcttaaagagacgcaataagcgtggcactccgacttgagctgcgaaaaagccactgctataatcggccagattggttgtagccgaagcaccagtccctaggaagcccgagacggcatcgaaatccacggagagtagaatttggacttttggtttcctggaagtcattggaagtgaatttgtaattttctaagtagtgcaaaggtccaggtccaggctaaggggttatcaaatgacaagcagacgaagttcaagccccgaaccccagaaggaaagacgacccgacacgtggatccaccccgccatagagtgcaacccttgagaactccaacctttgccttatcaattcactttcggagaacaacatgctgttaacgccgattcaacaagtctactcttgttatcctcttgacttgacacagcaacatctaaactcgggtttcccgtaaagaagttgaccggtttgagaccaaccgtcatctttttagagggcatcactggccaatcctcgattctcggattgtgcgtggatccaaatgtgtgccaaataacaatgtcttcatttcgcactgttgacttggagtccgggtcctttctccgctgagaaatggctgagtcgattccttcgccgccaagggattgcatagtatgttttccggccgggaaaagctcgtcatccttataacgggtgatccagattgcatggtttccatattcagatcgctttgcatggaaagactctggatgggccagtagcagttggctatagcatggaacaattttgaatccaatcggcgtaccggtgacaggattgactttcgcctcattgatgatcttgaacgtgcgattcttgttaaaatcaagatctagccctccctcctctgtcacaatccttgaatgtgttgtgtacccgaccccgaacggatttcggacagatgggtcgttaaagggcaaagggttggactcttcaacctgcaacgagtttgcaactccatcaatcgcaggatcgatgcggagagagaacaagtgttggtgatatggtgcaaggacacccggagcaacaatggtgccatatccaacttcgtcaccgatgttgatgggactggtagacaagatcccagtggcccggacttcataatgaatcgaagcatcttggccaaagtggaaagcaaagatatactcataattgctgaccgtgatgatggtctgcagcactaggatacgtgatctgaccaccgcggcatttcccgtacggaagtttgtgtgcttccataaaatcccatcgtcttgctcatgacagcagatgacattgggcaatttcaagggttcccccgaggaagtgttgtgccatccgtcaaaatacttgatcagtcccagacaatcacatccaagcgataagttgtttgcgttgatcccagccccgtcgttcccaaggtcaaatgcagctttgcgtggatacggagcacgaggatccccatatggcacaaacatctctgccaatgacagccggtagaagagactccgaccgtcatagcggatgtcatgcaacgtgagaccctcacggtaattgaagcccacgcgcatagtccatttctcccaggtcaataggtttccgtgtgacttgaaggaaaccccttctggctggacaacctggtagggcttggtggttgtgcgcggtggtggtcgcagactgggatggtattcactcatatcagtgggatggatcttgcaggggtcgtacagccgtgcttcttcacgaacactctcgctcgcagacgaaggtaaatggtagaccttggtcaccctgagctgctcagagacctccgcacacaagtcaagtggatatgcataatagttggcgtcgggattgtccactagtcgcatataaaaccaacactattcatctatgttagctgggattgagatattgcgaatcttatcagacatgtactgaccatgctaatccgttccgacatgtcgttcatgccatcagtggcataagcccacggttcgacaacgaccgaagcccctcgaggtaacctcaactttccaatttcattttgtaccctctcgtctgccatacaagcattctcaacatctttcatataagccgagtcaatgaaggagtgttttcccacaagggtctcttgttgaatgacaacactccggtccagatcaactagaagctcggtgagttcatttggccccgagtcgccacgaacgaccacttggatatgagcgatacgaccaggtcgggagacttgaggctggttaagatgttctctctctaagaatactatcatctcctgcttcggtggctctttcaaggtgatgaagcgaaagttgaagcttttttcatgaagtagctcttggacaacttttgcggcctacaatatggttgatacgacattcaacttttgtttaattaaaacgacttgacttaccttggtaatttcctggggcacaagaggatcaaaagggtgcgtatcagacataatggaagtatctaagaggtgaacgaggataataaagacagcgtgataaacctgggcttttataagttgaactgcaagatatatcagccaaccagtcacagacaagaccagataacgcaatgcatgatattcgctaagatataagaataaccggaaagatcggctggtcaatcgctaaggtaaagaatagccggaatatcttcacctccaaaggttagaacggaaatagacctctatgtatcataggaaggtaagcactagagcccatagtatattataatcacacgaatcaaaactcacttgaagccccaaatatatcagtgagatgtttggggattttcctgttcggcttatctcctcttttccccgcctcaactcttttcttcctctcgccaacctgtatattcaaaacatggcttcaactcgcaccattctggtcttccagcatgatgccagtctccatattcttgaaacaaccgtgacggccattttccctttcaaggacctcgaagaatccgatcgtctactcttcaaagacgccagcgaggaacaccatgtcattgtcaccgagaagactattttccacccccaaggcggcggtcagccctccgacacgggcgtattaaaaggcccatctggcactttcacagtcacggctgttcgcacggatgccaagggacaggtgcttcacctcggtctcttcgaggactcgtcatccgctttcaacaaaggcgagaccgttgagcaggcaattgatgtggaaaaacgtcaactatattcccgtttgcatactgcaggccacgtcctaggcgcatcagtccgacatcttttggagaaagagattgagaactttgatgaactgaaagcctcacatttccccgactctgcagcatgcgagtttcaaggctcaattgaagggaaatggaaggaccctatccagaacaagctggatgaatatatcgccgccaagatgcctgtccaaatcgaatggtgggatgaagaggatttccggtcgcgtggactggagcgattgattcctgaccgcagcttggtgcctgcaggtgaaaagtctcgtgtggttaacatcgtcggtgctgaagtgtacccttgcggaggcacgcatgtcgatacgacagatttgtgtggacctgtgacggtcaagaagatttcgagaaagcaagggaactcacgagttagctatgtggtgaaatgatgttgtttcactggttcggcttttgggaataccatatagacaaggagtgagcgacccaatagaccaaaataatagatgttttgactagacctcatctcgaatcactttccacctcggcgatatgttacggaaaagttctacattacatgtgagagcaatgggaggcctatgttgttacctttcagatgtctaaataagggcccaacagcaaatgtccctgatggtgcgagtgaatactccagggtagaaaaatcatattatgcctaaaagtcagcgctagattcatcgggatggctctatctcctggagctgatagccttcctccgagggatcagcgcgtgaaataaagggccgcgcaagagcctcctcatcatcgaatttagcaaagccatcgggtccagcaatatcagctttgtcataaggaacgtcacacatgaccgaccgcagcggtggatagtagcgacggtatgaaaaccaggctatcagcatgcccaagagtcctccacacgtcacatcatatacatcatgccgataatcggccagacgggacagggcgaccatcaaagcacacaacaaggggaaaaacccaagtaaacagcgtccaagatccgttcgaggacggaaaacatgcatttgaccacacaagaagctataaagtgacgattgttagatggagtgtcccagcgctgcgcatcagaatcacttacagatataaatagcccagcccgccaaaagagaagctgctatgcccactagggaagctcctccatccctcttgtagaatgtgctggttcgattctgtgcagacagtccatgcgaccagcgcattgttcgatgtacctcgggagggtttgcagcgcgataacaagtccggacgtggtctccccgctgcattttttattatgtccgtcaggaacgaggtcaacatcaaagccacgaatagtccgagtactgtcacttgcgtcttatgcacaccggcgcgaaatgttgcggaccaggcgagaatcaccaaaaaaggaatcagaccagcgaagatgaccgaccacacttttactccggttagaaacaagtgaagcagactgcatcattggcaattgacttacaaacaggaactcgttcgtggacagcgaacgggtactgaatggctttgttatccagcgaaaacatgcgatggaacgggttcacgaataattgaatctattcatgtattaaaaatgtgcagatccatgatttagatcgtttgcgacttaccagtacccatcctgctactagaaaccccaatgcgatatagtcggcggcataggtgcgttgcgcaaagcgagctgcagcaccagcgagtccaacacgttgtagaatcggggtcgacccgttccccgaaccattgtgaggcatcctgcacaactgccgaggacgccagagagatcttcagatcttgactgggcgcatgtcgagattggaaaaaggtcaagttgacattcgacacattgcggaagcacagaccacgtcaccgctccgtcttccaaacaactcggagaaacttcaactctgctcacttggctcaatttctttctcctttctcacatctcctaccctcgtgctagtcggtatggccgatgagagccaacaacgagctgtgaccacggcatttgcgcccccgccgcccttatggaaacacttcacgcgtgagaatatcgacaagctggaacagatcaaagctgaagcttccaagggcgaggatggacggttgaacaagcacaagcagtggtccgcagctgaattgcgcgctctggagctcccctcagagctccggtacctagtgccgcccgacatccccgaaggacaatacagcgtctttggcgagttgcaaaccgttcgttcccctacatctgagctctgcgccggacaatactgactctgaaatagctgtctacaacattgccgtcattacaagagcaaggcatcgaacaactctacccagaaccccccgcagccggtaccgaccagaactcgcagccatcaccccctctcaatcacgcatactaccttctcaagatcagcaagtccctgctccttaatttcctagagttcaccggtatcctatcggtttcgccggaacaattcgaatccaaggtcgaagacctgcgcaacttattcatcaatgcacaccaccttctcaacctctaccgtccacaccaagcgcgcgaatcactcatcatgatgatggaagagcagctcaaccacagccgagaggaaatgaagcaaatggacaaggtcaaagcggaggttgagagtgtactagagcagctgcaagcggagggcagccgcatggctactactgggtcaggagacgataccgaccaggccaaagcgctgaaagaaaaggccgatgagcactctcggctgatctgggctctactcgacaaagaaaactgaatccagcaacgggctggtttctctgaatctgaacagtattgccttctccgagtcgaacgactgaaccattcctgcgttacgtgtttaaatgtgacattgtttcgaaggtcagcttcgttgaaaagcctaccacggaggaatctcgaatcgagtattcatcagcatccaacaaatcgtccctcgggttctctatccaggtctcatgggcacgcaatgctcactgggctgtcaaatatgatgtgtcgatggaaggatcgcgcgcttcgtatcatccaaggcagatattgaaccacgccaatatcttggggacattccgatgttctagcaacctgctatcaagggcgcctcgttttagaatactgaactatctaagaccggcactctcgaagtcccattaaaccactcgagaggccaacaacatgccggttttcgtgaatgtctgccggagcttcttgcttacaactacaggcagtatcatatatcgcatatcattatattgtacactggtctgaccctttctaccgaatgcaatgcaaatgactgctcttccttctacattattattttgtcaattctaagtaccgtagccaataaactcctcacgctaaagtagccaatgagtgaaataacaataacaaaatgcaaatcaatgagaagcggcgcgttgctccgcccaggccttgtcaatggcacattcggccagtcgcttcaactccacaatgaaatcggcgaccaatttgaaatggccaagttcagttgcaggtagtttccgcgagaaaatacgctcaatcatgaccgtggcgacattcaatcggcccaggtcttcacgcgaatgtggatccaatgggttctgaagaatactgcagaagatggtgagcaatgcggacatggggtagaagatcagagtcctaggaggataagcttgggttccagtacatagcatgacgaaaatcacataccagaaaaccccatcgactaccacatgttctgccgcctcgaggtaacatagacttgatcgactggcttctaccgaaagcgccatacttgaactcaccccatccatcataccgctttgtccttgcatccacgctttacatcttccactcgcttgatggatgatggtcatgcataggtgatagttcagacgcagcatgacggtgtgcatacgcatgttcggatccgaggtctcggaagaaaatgacatggttggacgccatctaggagggactgatagccgccattcttctagcgcgtcatcgagttctcggattgacttgagcagctcggcgtctgatttttggagacagctgactgaatatagctctcgatgggcccgggctttgatgatgctcaggcgcaagtcgaatggaaatactggaccgtaccatgggacttcttcgttttccacgtccaagaatgctcgatcgagatatcccggaggtagtgtcagatcacaattttcgtcagtgatggtaggcggctgacccgtgcgcagtgcaagatccttatcaatcgtgtagcaaatccagaagatattccgtagttgtgaatgctcttgctggctgcgctcatccgtcgagatggcctgaccgtcaagccggttgccacccagcatgaaaatgagtcgcgcagcaagcgccgcataatagttggtggtccgcatatttcccgaagataattcgaagagagtctatgttcatcggttagttatcgaaattatacactagagtagctcatttaccaatatggtaacagcctgcgctgcgtccagactggcagactcctgtaatacttgcggcataaagaactttgccttggtagcaagtagatcatgatcgattgcagccgtcgcagtagtcgtgttgacaatgtgcttgacgtcagggagacgagaaacaaaggtaagaaatgcaatgacacaaactctggcgctagcctggccatatctgaaggtagacagcgaatgactgtaagctgttcggatggtttcttcaaaaagctccgggtctataacaggaaagatgcgccgcatcacgttggagctcttatatgcctgaaagtacacctgcattgttccccagtcgggaagttcatagggattggaagtgttcatgttcatgttcatcaaaaccgagttcaaggtctgtccgcgctccttatcccaaggcgctcgggctggactaagtttatcaattgaaacgtgctgtccggtgcgagcctcgatccattcctgtccttcgggaaagaggaacggcgtgccagtgagtaaactgatgacacccaactctttgcccgcaaagtgaactcgcactgacgatgagtctggaagctgagtgttacttggggagctgctggccgtcgtattgacttcgaaagatcgaggcgaatctccaggcacttttgccaattagtttcggggtacttcttaggcctgcatattgaagaggcactaaccagatatttgatcacccagtagattctctgcaagaagctgctcgatgcgactaattcgctccgatagtcgtgaaactttggggcgtcttatcttcgacgtcagacacatagaagaacaagctcgagatacagactcaccccccctcgtcgtcccttttccttttcctctgtactactctgtcgaatgtgcagggaatattatggtggctgcaccaattacactgcggaattgcagcatcacatttgatctaggaccagtttagacgggatcgagagttgacgatgaacgatctacctttcttttgtaacaggaatcacaggcacgagcagtgcgtgtccgtggctgatccgaggcattagatccatgatccattgtatagttgagatgtcttcagcaaaaaataagctcaaaggatgtgtcggtggacatggctgggtccgaaagccgctgacaaaatagccgctgactcagccacgtcatgccgaggtccatgagacgaagtgatagagccattgatgtcaattagtttggatagtatttatatgtagaattccggcttggatcgctagccctactaggggcggttgatattcgaagacgagtgttcagttttgaaaccccgatcgggtgaaaagggtattcaaccagctgccgagaagctgtttttgattgtctctgatttagaagcttcaattcgtacggcagggtatgcttcgagaaagtcaagtttatcaatatggttgatcccatgccgcattttcgttgcaaccaaccgaccgtacgtccgtttggagaccgcaaaacagccgatatcgagtggttggctgctataatttaaagctatagaatgaagttataagacatcgcatttactatgtgttttgggtgggcggctcgcttggaaattacgtcgtccaaggacaaaaaaacagattccctgtatattttccttgtcttgccctctccacatgcgatcagaccatcgccaccggaatccccaaacaataaaacacgtccaagctcgagggagatgaatggcagctcacatcacagtgcatatgcagaaatcgcactcttcatcgccgcagtcacagccaaagcatggcttagagaccgatttgatgggctttgtaatggagctaccggagctgctggaaggaaggatgcagtcgaatgggattgaaatagaggtgacggccatggtggataaaggcttggatctattggagattgtcagtcaagtccgagcgagaaaacaaaaagccggtaggttagaaagcacagaacatcgtacctgcaaaaacaaacacgggtatagggctttaagcagtgggttgggagaaagggggaagatgaaaaagttaggcgacaggcagtcggttattaaatgttcccacttagacctcgttaactcccaagaacaagagatacgagcctaagagttgttaggccataacatcttttattatctgaatcaaaatggacccgccacacacgtcacgggaatatagggatattatgccaacataggattgagtctataagcgcacgagttagaataattcagcaaagtagtagagaaagaaagatactttgccctctaattagtatggcttcactctgtaataacaccgtcttcatcccattcagataaccgaggcagtggttcgctactagtctagtagcaagaagcatcatttacatgggaatctctcagtcacaggagtgggcgacgtagcttgaagttctctccactcgcacctcttcgtgaacacgaataccgtcattactgcttccatactgacccaccagaatctcttcatcgctccgactataacgaggtttgacatacttgccctctgagctctccgaatgcgatccatgaacgatggtgcgatataacgggcggacggtggggatgccaacgcagataagagtgacagccagttcaacggcggaccagattatgaggttaacagtgtcctctagaaaagggattggtggcattggatctagacgcgaggaggtggcttaccggtgtagttggagctggctaacccgcccaggtcaatagttcggataattccgcaaatgcaggctctagaaacgaggatgactatgtatccatgaagaatcggatgtgatacatacatgaagcccagactcaagctgatcgcgatagacatcttttccttgaatttcatgttaagattccaaatgaagatccacggaagaagagtaaaataaaagtccacggcagcacaccagcctagattttatcaatatcagtatagacatctcatacaaacagtcgaagagatatcgaacatacatccaagcataacggagaaaggggtgactgagacaacagtataccctgggacgcgatgatcccatatagatcgagacggaacacgctggaaccaaaagataagggcggtcatcatcgacacaatcgacaagctgatcatcgaggtccatattgaaatacgatgccatcgcttgataacaatacaaagcaggaaagttcccagcgagatcttcgcaatcgccattcctaatatggcaaatgtttttccaatcatttcgttatacacggccttcacagctgagtccttctccaaggtatctatcgattgtccgaatccatgcacaccagcaatcgtgagaaagacagtgtaaacgagtaggaatacctataattaggtcagcgttctatcataggtctagtcttgggtgctttgcgaatgggaaaatacaccttaggccaaattgaagatatggtcatccctcacgagtgctttcacaatatggactcggatgtagagcctgagcaggaccagaataaaagagagcaaagtcattgcccacagcacggaaatggcacgaacgcctttcccagccaacatcttccagattcagaaagccggttaaatcagaccaaatgctgcagaacaatagcgcccggggcttgctagattgagagatagagaaactaaacggcattgttgaacaaatagatccttgctctcaatatctcaataagttggaaatagtaaaaaaaggatctccgtgaactacaaggctaaaccatttgaagtcggtacacgcgcggattataatagaacagcgacagctccatgccgctcaatccgttcatttctgcacttgcagggtcgtaattcatataccagcccgttatgtgatagcctatattatttattaaagatcatcgggacgttcaggcttgaaaacggcccgcagcgtagtagcgctccttcgaggagtttgaaaagccaattaggtacttccaattggatattgtatacgaggtactccatatttcgtactttcgtccttttcatgcttttcgctattttgatgggtctatgtgtctttgcgccagcctattcgccaatcgtcggaggatggcccgttcgagcaagtcaattggagttgagtttatcctattggcattaacgagactactttgatgcacagctgagtctaggcccagcaatatggagtatggaggatcttgctatcttcgcttgacaactagccacgttttgattcgcatgcccttatacggagccacatgggatcgacattgtgagagggtatatgcgcatacgcgggctgtctatatattattgtatatcacggatgtttgagggttgaagagtgtatccagctgtcaactctccgtcacatatcattccacgatattaaaagatcgcctttttgcgatgcttgattacgggaatagagatgctgccaccatgcttggctatgcatttctcatagcccttccagtctggtatttaacgacatatctcctctccccgcttcgccgttatcccggtccctttctcgcaggtgagttgcagtatcattcttaagacccctttagcgttccgtattgtcctcttatacctcataggctggacaaacctatggcgtatgttacatgttcgccaaggaaataaccatgttgtcatccacgagctacacaaaaagtacggccccgtggtgcgcattggccctaacgtgctcgacctggatatccccgagttgatcaagacaatttacaatatcaaatcggagtatttaaaggtgtgtatcttactgcaggtggctacttgtcactagtattgatcgtagtctgtgacagaccgagttttatcatggcagtagtgcgaagaacaacggcaagatcatctacaatctcttcagcgagtgcgatcccaagttgcatgcacagcagaagcggcccgtctcgaaacattattccatgactgggattcttccactggagccccatattgatgatatgatttcctacttgtgtcaacgtctggaggagaaattcatcgatggatccaaccaaactggaacgtgcgacttgggcgaatggattgcatattgtaagttcaagcccatcgcatcaatcctttccaagacttataaatcatctagatacctgggatgtggttggcaatgccactttcagccaacccattggatacctggaaaaagggtatgactttgacaagaccctgagtatcgcgaatgtcgccatggactacttttccctggtgggacaaatgccaattctggatcatttgttagataaaaaccccatctaccgaattggcccgccgtccttcggaaccgtcgccaacatatcaatccagcacctcacggaccggcttcagaacaaggacaccgactaccatgaccccagcaagcccgattttctggacaaattcatcgaggccaaggagaaattcccagaggtggtggacgactcgcaaatcatctcttacctgatgaataacatggttgcaggagccgacacaacaggcgtcaccattaacgcagcattgtacttctccttgaaacatcctcacgtctgggagcgtctaagaaccgagattcccgcccacgaccataccgctggaaacaaggtggtctccttcaaattcgccaagcagttcccatacctagatgccgtggtacgggaagcaatgagatgtcatcccgcggtcgccatgctcctggagcgatacgtaccagagggtggacttgcccttcccgatggaagcctcgttcctgcagggtcgatcgttggcatgaatccctacattgtagggcgcaatccgtctatctggggtgaagatgccgaggagttccgtccggagagatggctccgcggtgagtcggagactgaagatgcactgcagaaacgtttgcaatcaatgaacaagctcgacctcacttttggcggcggaagccgtatttgtctagggaagcaccttggtctgctggaggtgtttaaggtgattgcgactctcgtgtcacggtacgatatcaagctggctcatccggagaaggattggacgacgcataatagcttttttgtgcgacaggagggtgtcgaggtgaagcttgctcgccggagttgaaacattgtgatctacaagacagggctacataggaaacacagggtacatatgcatgtagctaagacacttttacggaaaaaatccaaagttaaagattcaaagcatgtactcattcacactatatacagcagcaacttttgaggggtttcatcaatcatcgccgcagtgactggggtatcgtctagtcattcgggcttccaagccatccgtctatccattaaaataaatccttttttgttcatcaatccgtaacagagcagtcggtttacaactgctccacccagggagcaacaccgggctgcatctggttcagccacttgacaagctcgataagctcggcccgacgctcatcctccagttgatcctcgtcgctgagaaccgactggaagataggaaggaggctgggggtgagttcacggatggtgacatcctcccacttgtacatttggcagatcatgcggtacaggggctcgttctcctcgtaatcgttcttcaggggaagaatgttcacaagggcaggaagaacatccttggtggggacactatcgcggtaacgcaagatcatgcggctgacacagccggtagcattatcctggagacgcgagacgtccatctgaaggcaggcctcaagacgggcaaggatggtggggatctccttgatgatctcagcctcagcattggagtgctgaatcaagcggccaatggcgtaagcagcattggacttggtttgggagtcctcatcggcgaggcggtgaaggagcagcttcaagaagacagaggtgaagggggtcacggcagcacccatgccgttgatgcactcagcgaggacaccaacagcagtggcgcgctcaagagcctcagtgctaccagcgtagcggaggatggtcttctcgaacaccttccagagctcggcaaagctcgggcccatggcagcggccatgccagagacaacgtccaaggcagtgtcgactacaatccagtcgaactcggaagattcctcaccagcctcgagagtctcctcctcggggccgaactcgacctggcagatatgctgcttggtgatgatatcagtgaccatctggatcacgttgtgaagcatagtctcgttggcaatgagggcaggaccacagaagcgcaagttctcggccatgttgcggttgatatcggcgacagtggaactattaattatcggtcagcaatcaagtcattgaatcgacagttgataagtaatgaggcaatggtaggagtagatctcagactgtagacttcgccgtttacatcaagtacgcctttggcgcatcaaagtgagctgggttaagcggaaaaaatcatcatagaaatggttgggcaagggaagaaaaaaaaaaaaaaaaaaaagacgggtgacacataccggtcatcttcttcggtccacatcttgacagtggctgtcatgagaatctcaccgaacttctggacctccttggcaggctgaacctgaagggggagaccaggctgccacttgggcatctggccattctcttcggcgatagcaaagagcatagcgtatgagcgatgcagagtgctgatggtgctcttgcgaacaccctcgtaagggtgctcacacaagggcatcacatgctcaatggtcttctcaaagtaaggcaggaaggcgctgcgggtgtgggtgacgaggtcaccgatgacctcaacagcaatctccttctcgagggaaagaggtgtggtggcggtaatgtcatcccactcgtcctcgtcttcgagatcaatatcctcgatatcaccatcatcctcatcgtcagcacttgcgaccttgaccttgcggccattgaaggtaacctcctgtccaacaaggtccttggcagcactgccgagatcaacatcaaggtcgctctcgtcctgctcgatgcaatcgtacagacccttcacgacaccgtcaaggaagggggcgaagtgctcgccgtagaccttggccatggcaccccagaagatgtatgtactctccttgagacgggagtgaccgagatgcaaggcttcctcagtggcacgcatgaggggctcaacgtacggctggtagcgttcaggaccagcggcggcggccatctcacccatggagtcagtgacactggcacggagatcgagttcatcctcactgtccttgacagcagcaaactcctggaggagatgcatcgactcgtcaaagaatgagaggaaggagtcaccggcagaggaggcgagggagccaagagcaccggcagcaagggccttgatcttgaaatcggggtgcttgaagagattgtgcaggatagggacaagctcggcctggtaaggagaaacatccttctcgtccagaccatcaacaacagcatcaatagcactgataccggccttgataatatcgagtgtagggccttcctcctcgcctttgtactcttgcatggcgctggccaagttctggaagagcaacggcatgaggcgagcgtgctcggaactgaggtcttcaacgagatcctctgcaagacgagcgacagtgtgcaatgaagcctggcgcaccttagggtcctgatcagcaaggagctggaggaccatagggaagatctccttcatctgggtgctgatgaagtcgggggcaccctcaacacacatgccgagggccatgataccagcgcggcggtaatcaggatcggggctgttgaagtactgacccagcgcgttgagcaaggggacaacgacctggctaggaggcaggctctgggagagcatgtcaagtaggccgagagcagaacgggcaggggtgatatcatcatcaccaggagaggcatcgccaagctcggtaacaatttggagagcagtacgggtgagctcctcgccaatacgcataccctgaaccttgagcttgcggtactggatggtctgcatcaggaagctgatggcctgggtgcggacatcctcgtcaacctcagtgttggcagcgatctggttcatcaagatgaccaggtccttgaggtggacggtcagcaaagcagggtcacaaccaagcagattctggaagacttcgaaagactgcatgatgtgatcctcctcttgcttctcaatggagtccttgagaatagcgaccatggcagggaccaactcttggaaagccttgacgggagcctcatcctcctccgagtccagatgcatagcaagcttgctcaaagacatgagagtgttgatccgaacttcggcgctttcggggtcgcggatggtcttgttgaagaggttgaagaggtcctggaacttctcctcgaagccttcaccgagagtatccaagatggtgaagagaatgtaaatagccacagcgcgctcagcagcgttgccattgttaccagcctgcaggagcaggttgggcaggtcagcccactcgccgtcgttcaaatcgatcttcgcaatagcggagatgatctgagcgatggagtgctggacgagagatgaactctcgcccatggtagagcgaagcaactgttcacgaatctggggtttctggaccgcggggaccttcagccagtgcttggaaacgagtgaacgggactctacggaagagagctggcgcagattctggtcatcatgactagtgcagatctggataaggaagacaagggactcgggcttgttgtagaactccttttgcaagactccggtggcctccttaaggtttccctgggaggctacatgaaggggtcagcgagacgaacatgggcttcgacgttgcaagacgaactcacgatccaggataatctgcaattgctggaggaatcgctgttgatccatgatggaaagggcaatgtagaagattttcaaatggttcttctttcttcctggacgattccagttgccccaggtctctatgagagactcaggccgcaggaacaaagattgagcagtctgtctcagacaaacaactcaaagggggtatcacaaagcaatattgacaggaagcaaaaaaagaaagagagcggaagatgaagaaaaaaagagagtagtgaggggaggagggagaagaaaagagacgagaaaaaaaaaatttaggggagtgggttggttcctgattgggtttagcgcgggaacagttgtcaacaggcgggaatttgggcagagatttttagacgactccatttatatggggttagattggtgtgcatgttgttatattacgatcatggttacagtgagcattcatatcattcatgtcagttgatccttcttgtaaagagcgcaattgggacacgaccaatggtatatcagctatacctaagtaacggtaacctgcatgctgcagaagagtatagagattttccacatcaaagacagaaacatataaaaatcccttcgccctaaaactcctctttcgtccgtcttgtccgatggagagcaaaccgtgctacagcaacaataacaccagttagcaagtgcttggatgtattgacagccgtgcatccggtggtttccagaagacccacacactaacgaagccccaaacagccgaggcatcatttaatattcatcagactcatattcatcatggagtagcgatgagcggtagccacgtgaagcgagattggcctctaggccaccttcggaggcagggtcaaagtagcctaaatatgtcagtagagttctccttattcaatagcgatgggtcaatttgcacgtaccaccgccgccaaagtagctgagagccactggtaagaagatgagagcatgcgtagcagcaaaaatcaccagggctagccaaacccggaagtagtagatctcgaagatcttgcttcgagtaaacgccaggacgcaaaccccgagaagttttgtcacggtaataccactgaagacagtcccaccaacattgaccaaggccgcccatgctcgagcgtccttaccacggaattcggcgggcaccttatccatgatgggtcgagcggggaacatgaatgctcgggcaatatgagcacagaactcaacaccaatgccgacacaaatgaccaagttgacaagagataccgcattcaaggagacgccagcgatcgccatagtgccaatgatatcgaccactatcataaccactgtggttgtgatgacagcgcccgtggctatagaccccaatatcacagaggtcaagacgaagatgatggccacggccgacccaaggagggtaccagtaagtcgcacaatggaaacgtattgatcaaagaagatgtagaatttggaatatgggaagacgtcgatatcatgttcccgtgagatgtcatctgcaatccggcgagctgcaatatatgcctcgataaattcattctggctccgaagaggcgtgtggctagtacggaaatgactggcgttgatcgttttatacttgtcatcaatgaccaaagcattgctgtagggcgctttaccaccgagggggcaggatgcatcggtgggagcatcgatccatttttgggcgtaatggacaaattcagatccttccggcattcccgaaagagagatgttccaggcaggaacgcggtcctcaaaacaaagcttgccgttttctttgcaacagtcttgctgggggttcagccaatagaagaaatcatcaatccagctggcggcagagcctgcaagataagaaacattcggacgcttagactcttgctcaagaataaagggaagtgaatactcctcgcaagtggtgaaccgtccacagagctgttgttggtggcttcgttcggtaacattcacattccgagtcacgaaatagaccggaggccctgtgtcaaagtatgaatctaggtcgttgaaatacgaaatcagatacgagtcgctagggagcgcgatacgctgatctaacccaagaggaacctcggggatgaaggctagaccggcagtcaaaagacccaagaaaaatataacaacgccaactttcacccgacgatccaggaggaaaggcgcatagacccgacgaatgaagacctgcaaagtgctctctgcttcctggccgtcgtagttctccccagggaagccgaacgaatttgctttgcgtacagtaagacaagggatacagtccgcacggagactctgcacccgtctctggttcagagccaagacggagatgaacatggtgatttgcaggatggcgttaatgaagacagcaccagcggcgtatgcggcaaaattcttgacagcgggcataccaacaaagatgcccagggcaaaggctactgtctccgtcagagcagacaggaagatgctaggtccgattcgaccaaccgcacgggcaactcgctcgtcgatttcttcatcgggatggctgatattgactcgctcgaattcgtggacgatcaagaaaatgttgtctacaccgactgccaggaccaagaatggaattacttcagcaatgatcaaggtcaccttgacgcccgctgccgagaacagtccgaccgatgcagaaacagacatcaggacaatgatgatcccgacgatccccagtgtaaatttagactgaacaagagcattggacggattggtcagcagagacctccaggtaactgtgaccgagcccagggccattgagacgtagaagaacatgatcaggtaactgatgacaacaatcttcgcatctgtgttggtagacttgttcagttcctgttccaagctgacctcggaattaaaagatacgcgaaggcctcgctcggcagcctcttcttggactaccccgagaacggcctggaaagtgttctcccagtcaatggcttttgcttcttcttctgttccctggtcgtaattatttaccacccaggtcacaatgagtgcctgggcatccagaacattccctgtgtcttcatatccaccaagaatcatttcgggcttgaggggctgcgagaagtcggggagacagctagggtcgccaggcgactttgtgcagtggctaagtctgtccttccatgtatctgggtcaaggtttgagacggaaccgccgaaatacccagtgaaggattgcacgacacaagcttctccagtcggcttgaaacaaacgtcatcgaaattgagagcctggtccaacgagatcacgcgtcgcacacgagattcgacgtcaaaccaccaagtaagggtttcgtagtccaagagcggacgtgagtcattatctgggcggttattcaccaaaaatgcctgctcggctcggaagaatggaccaaagctctgatcgaagaaatccttctcctgggcggccgcagatgacggactcacccagagttgcaccggatccgtttcaacggtgaaatttagccaccctaggctcagcagcaccactccggtgacgctggagaatattgttattgctgggaaccgcgcacaagcaccaccgattcgatagaacatagctgacaacacagagttgagcttgtatactccatgtgatctttccatatatcctccacggtgcatgacttccccttcatcttcgtcatcgctgggcgtgggatcttgtagcaaccgcacccgctctggtttgcggaaacggcgttccttgtatgtgacatagctcgcgagagcaatgacaaataatagaaagacggaataaacgagaatgacggcaaacgatagacatggtagaagtcctacatgacatatcttgtggggggagatggcaggcaactccggacacacttccgggcagtcgacacaagaacatcggaatgatttgtcctcgtcattgcaggctttcggctttattgacaaagccttcattccttgcgggtcaggcccagtgggctctgtgtgatagttaatctggaacgggctcccgagaaacttcttatcacctaaaaacttcatgaaatggggagcgtctttcgcaccaccgccgatgaagtcaatggctttcccgcccgaggcaccgttctttacgttcttgcagctatcgtagaagccgttctggtactcctcggaccaaatattgtccaactcggtcacaagtcttttaccagatctgttttcttctgttttggtgacattgatgaaaagagattgatcgggggagcatgtaaaggtacagaatatgttgaagaagttgtctcggcaggcagggcaggacgcgataattccctctgctagtttgaggttactggaaagcgcatcgatctatgggttatcagcatgatagaattataaatatagtgatactatcgttgacgaaaacagaggccgggatctctcacctgttcatctcgacaacagaccggcccttcgctccatttgctgccacacagatttaccaacttttggcgtactgcgtcttctggttgttgcgccaggtcattatctggacagggtagttcacctccaaaaatggattgctttccacaatgacctcgaatagcacaacggcccttttcgtggattttagtttcgccctgtgcaccgacaagggtaggtgcaaaagagcccagcccaacgatcagggcgagagccctaggcaaccgcatcttgtgggaagaatgggtgtggtgcgagaaagaattctttctaccagtcttcaattaagatgcctgggacgggaacactttcaatactggaggttggccatgcactgttcggttcgtgtggggaatgttgcaggccgagctcaggagctggcgcaaggaggagggaatctgaattggaaggacaaccggacgatggagctcaatatcaaaatcggattaaaatcaataatcaagctcgatggctatgatagtaagatagagtgagtaagaggagaataaagcaagcttttagaagttgagtgacgtgaaggcggagacccgcggtacattcgtcccccgcacggtcacgcaacgaacccaagtaccttgtccaggcgctaaccgtcaggcacgatgatgtggctaatatcgtggctcgaatcagattggccgaactgacctctctgttcttggcatctagaacctacgggcaaaatatatttctatgtgattgtaaatataaatatgttctttgtccccgctcaaagagaacgtatgttgtatatacggggatttgagtctacgttataagatatgttattgtaaagacgctcatgatttcattcaataaaaaacagaaatgaccgactccgagccgaaaccgcattctatgaacaggaactccgagtctcaaacaggagagacaaatgtgattgcgtctgcatcgccggtgattcagttagcaatgagaacgaatatgggaagaacccagagagatgttaaaagatatcacatgtgaaaagaaattttgcaagccatttgcccaaggggtatcatcacaatgcaggccaggcaacataaacatgcaacctaatagccgtcatcatcgacctgttggtaaacgtggcgggttcgggtggggtccttgcgcatggtttgtccagagcctgtgaatcccactaaaagatgagcccggttagcatcacagagtagagaaagaatcatttataaggatcccatacctcgtgcattgacaccttcacctgtgcggaacatgctctcctttttgccaaaggcacctttgcctttgcctttagttttggcagcgaaatccttccatttgttcttgccttcttcaagctctttgttcgctttgaccttgcggggaatcttagcggggcgagccattccatcaccggccttgttgggttcgttgcgagcctgggtagctaatgcggggttgatatctgccgcggcggagattacaccggggtgagagagagcggacgagggaggtgccgaactgcctggggttccatcagccttgcgctttcgcgagtcagtgccagagatgggtcggatatccttggctgtcaaattttccacagttgcatatgacttgaaggtgacaaggtacactgggttgtccgatgagccagtgatggagttgattttggccgggtagaagccgtgatcgccggagacccagcgcgcaagaacaatgtcgttcaccgagaaggatacgggagtagtaggtgcagccgtggactcctctgggtgttcagaaggcttctgggaaccattcgccttgaatcggccacccttgggagcaggtttggcgggcgcagctggcttgagttcagcaatctgggtttggagaacggtaatgtattcttcgagttcagtcttaaggctgttgagttcagcattatcagggtctacctccaagcccaatgcgacagtttcaatctaatggttttaagttagtggcgcgtggtgaactggggggatttgccgcaactaacctgagacgtgcattctgtcaggtctttctccaaggaagatacatcagccatgatgagattctgattgatgtgagatagacagtgctattaggaacttgatctgcttgatgtgtatcggtgaagagctgagtggattgcggagaaataatctatctttcttcctgggcccgatcacgtgcattgtacttccgcctttctctccgccctgatagacggttttacgccactgcataaagtacatgtggatctgtacctagtgttcaccttcgttactcgtatgtggtcaagactttaatttgggaagactgggaagactgagcagtacgcagcatatctaattcagtatggtatgatatgcaaacaggcgatgaccctatagtatcatagtatcgaaaacatcgataatccactttctgcagatcgatggggatatatgcatgttaaggtctattagagctatggagtactccgtccaatatgctttatactactttgtatattccctgatttaggggtatgggaaaagtggtaacgtcattgaatggcctgatactccagcatatcggaccggggattggaagacccgggccagacccggcgacataggtacggagtacggagtctaaaagctccatatattgcattgccaagtcaagatgtgagtcagaggagtcaattaactaactaactactagttaactagttagttcgggaacagtgtgtagtatgttgtaggttaattaaacactttagggcttagaagctactcgaagtggagaaaaaaaaagaaaactgatttcaaagcagatacgcctacagccaatcatatcagccacaccactcaccgcccatccctgatcgccctcccccctcttccagtcctccagtcatacaacctcgtccatcgtttctcttggattctgcaactttcacgttggaatcgttgcatatcagcctcgtgtttgctcaagccacacttataccgcaattcgactagcggggaatttgtcctcgcctcaagcccctctcgaaagccgctagaaactcttcttcctctttcccccccctccatatccaatatcgccccccatatttccccccccccccccccccccccctttccttcccnnnnnnnnnnnnnnnnnnnnnnnnnnnnnnnnnnnnnnnnnnnnnnnnnnnnnnnnnnnnnnnnnnnnnnnnnnnnnnnnnnnnnnnnnnnnnnnnnnnnnnnnnnnnnnnnnnnnnnnnnnnnnnnnnnnnnnnnnnnnnnnnnnnnnnnnnnnnnnnnnnnnnnnnnnnnnnnnnnnnnnnnnnnnnnnnnnnnnnnnnnnnnnnnnnnnnnnnnnncccccccaactctggaattttactctcggttcttacttgcgacggatcaagattcaacataatatcggattgccgagattgctcactcacaaatccgaataagttgtgaaacagccgtgaagctatactgcgaggattgaatcatcctccaaccctcgtcgtttcacggcatccatcaatatctgttacgggcgggaggcccggttggactctgtattgaaatccattcatttttcatcacccttgcttttcttgtctctcgtcagcccctctatccattggaagtagaccgtcacaatgggtgattacgaacgataccaacaaggtctttacctttcccccaaccaacaagacctcttactagccgctctatcttccaacaaccccagccaaaagcctcaaagtggctctcccccaatcaagtcctctcagagccccgacgaagatcccccaaacgctcttagcaccgacgatccccatgccaacaatttcggatttggggacgacgaaagcccgttcctggatttcatcccggaggtggacttcgatttccccggctcggctgacttgattggtgacctaccgggattggccgactatgatattggcgggaagcgaaagtctctcgacggcaagtcggacattgaaggggaagaaaccggaaagaaacgtagggaaagtgaggccaagaagcctggtaggaagccactgacttcagagcctactacggtatgccactcttgctgcacgcggaagttgctgggactagagtcgtgaactgacgtaattgagcagaagcgcaaggcccaaaaccgagccgcccagcgagccttccgcgaacgcaaggagaagcacttgaaggatctggaggagtcggtggagaagctgcaaaggacatccgaaatggcaaaccaggagaatggcttgctgcgtgcccaggtcgagcggttgcaggtcgagctgcgtgagtaccgaaagcgcctttcctggatggcctcgggatcaggaaacgccatctcggctatgagctcgaattctattccgggtgcccatgccaaaggggcctatggcctccaaaacaacgagtttctcttcgatttccccaagtttggcgatttgcctgggggtcatctcttcaacggaccggccaacaagaaagatcaatccaaatccaatgacaacgtccctcgggcacctggtgtcttgggtcgcgacagtctgaacagtccctcgtctcgatcgaattcgctttcacagtcgaacaaatccaagtccaccggaacttccaccaacgctacttctaccaaatcgccttactcgggcttcaagccttccgcaaatgataaatctactacttcggaaaattctccatcgtcttcctccgactcgcaccagagccagatgctgtcgtcaaacgggacgtccccagaaccaagcatgaactcttctccaaatgggcagtaccgtgagctagggccaggggactcttgtggcgggcatgtcaccaccgatggagagaaatccttctgtgaacaacttggtatggcttgtggcaacatcagaaatcccatcccagcggtccgggatagcaggtccaaatctcagagtgtttcaagcggccaaccaaccccgatcgatggtccagccgggggcgaaggctctcaggatcttggaattgattggctggcgcatcagaatggcgggcagttcgatccagtgctctttggcaattggcgagagccccaggatgctgtgctctctcaggatttcggctctttcttcaatgaagcattccccctgccggacttgggtagtccctcccacaatttgtccgaggtcgccactgacgcggccgcacccaagaagaacctcatttctcagattgataacaagctcgaggaagatgaggtcgttccaggcgaagaccagtcgcagatgctgtcatgcacgaagatctggtacgtctatcctcatataagtattcaacagtttatcttcttccagatgactgacttcattttttctctagggatcgtcttcaatctatggaaagattccgcaacggcgagatcgacgttgacaatctctgctccgagcttcgtaccaaggcacgatgttctgagggtggtgtagtcgtgaaccagaatgatgttgatgacattatgggacgagttaagtagcggcttgcttccaggaagctcaccgtcactgccgcccttaaaacaactcatactcgggcttaattcacgattcacggaccaacaccaactcattgatacttgcgctctcttgatttatacgcatacccatcgtcgattgtcatttatgggaggaatcctgcccggcgtcatgaatacaacacaggataaagaggaaaaactcataggagaggagaaataacatcctatttacgggatatctgattttgaaagcgaatttttttgtcgatgcccatagctggcaatctatcagtgccccttctcaaggggacaccacattcctttttttcccctctgctctctttgcaacagtaattgtcatttgatttattttatgcttgttctgattgacaacattgagctatgggagacaccgtctctggccatgagatttcagcaaaaatggaatggcacttcaaatgcctattgtacggaaagggaatatggcgaaattgatatactactttcttttgcagctgggacagaatagccctgctttgcgatgttcaatgtacttttctttttttgtacacaatctattgaatggatctcatctctactcgcaattgactcaattccactaacccagcttgattgagcatacggtaataggaagacttgtaggtgcgcaagaatgagtacgaagtagcaatctcgtagatctacaaactccagaagaaggaaagctgtaagggtatcgatgtggtccacggacgtaaaaaataaagtacaaagagaaaagaggtgaaagggtgcattctttttttttcttcttttcttttctgatgatgttttctccatccattcctccctctgcaaacaaaaaaagaaactgtctggagctcaccgaaggactctcacttcggagtccagatcaacgctgcaattagcgtccatgtcccgtgtccctgaccagacctgagaacaaagaacataaaagattgagcgctatcagagtcaaataagggaaaaagaagatttgcaaatgggacaagataaaaaaagacacaaaagaattagagtatcaggtgtgtaagatcgaggcaatgtcaagggccgggggaaaaatatgagacatagaaatttgtatgtcaccgatcaggcgtcgccggatgcgacaggcttgtcgcctgagggggtaggagagtcattagggccgctcttgaagccaccccggcctcctccacgaccaccacggcctcgctcgccagtgccacggccgccgcggccacggccaccgaatccaccacgacgactgccatcgctgtcactggcgctctggtacccacgcggggcggtagtgatgccaccccgggtgctggactgccaagttccggcattgccgacagcagcacgggtgctgcggtcctcgaagaacttgaagttgggcttacgtggctgaccatggggagtggaaccgggcttctttagctcaataggcaagtggtccagagccgccttggcctcttcgacgcccgagaatgtcacaacgtggttatacttgccgagcttttcgatcttggtgatcttcgatctgtcctcctcagagatgaggtcacggacggcctgttcgctttcggcgcttgttacgaaaagagcatttgcgggcttcttttcggcacgtggtgcaggtgattcactcagcttttcgtgcggggcaataccgttagtctcggcagctgcggtcttctcctccccggtgggctgagcagaggcggcaacaggtggctggggggtaatggacttgggaatcacgggaacaggggaggctctcggtcccttctggccctgaggaatgggtgcacgcgcaggaggggcctggccgaactggggagccacgacgggggtccgggctgcgcctgtcggggcgggtgaggcagtggtcgctgggtgaccagtagagacaggttgaggggcaccacctgcctggggtttgccagtgcggtgggcgaagttgaatccttgagcccgcatctctgtcgcgatgcgtccaccttcaacctccaatacgagatatccgaacgccgcatcggccaagttgaagttccacatattcttgaatgcactctcgtcgacttgtccagcggcattaccagcggcaacggggccaccgaatggattaccgccgttggcaatggaaggcatcttgtgaacaacatccagggcattctctagaagagtcttctgtccatcattagaggagatagctgcctcgacctcgatccggaccgtctcccagacatcgttaaatgacgccttagaggcagcaagcttgccacgataatgatccaaagacgggttcacggagaactcattgtacgaggaaccgtagcggaaatgaagaccagcggaaattgaaaaatcggccttgagggtgacggaaagctggttcagcatgccctcgcgggcaggagaagcgtgagtgacaaagatacgagtctcggaggggtcgtagacacgattggcggtgtcgatgagttcgcccatctgcaaaagtgtcgtccacatggtaccttggccgccggcaatagtcgtctttccttcaccattgtcgaaaagcttgtgcatcacgacagcacctcccagacccagcagacggagcttcacaccgccgatatcgagaaggcgcgagttggcctcgtcgataatgtgtagcttatctaccttgtattcacccgagcggaacttctccagcacgcgcacatcttcgcaggcaccccaaactgtgtaaacgggcacatcaagggtgatgcgcttgtccagtagcatagagagctcagagaggggcaattgctcgggcgggaagcgctgcttaatcgactgctgaggagacacctgtgcgatggaccgtttcacgttctcggggaggaggggggaatattgtgccacatgcttcaatgtcctgttcgtagattcgggttagctgatgctgtccagtagatttcggtgcctggcgaggcgaatgtgttgggcagcaaacacgcgccgaaaagcttcagaagaatactcacttgtctgcaattcgctcgagcgaggtgtcatcatagaaaccaaagtcaccggtgtgaatgatgtggtcggcgcgggcctgcttcgcaagctcgttaagcgacttcaagttgcctgttttacgcgtccaattaatattgtgtcactttgccaagaaagacattgccataatgtagttacctcgcacgtctgcaatgcacaagattcgtgtcggaccactctgaatcacacggccattgttggggagaagcggcgtggcaccggggacagggcccgcagccgcaccattcgaaatagggtagccttgagcaccgaagttggggcggggctataagttaaaaggagtgatgatattagccaagctctccaaaatctcaagatatgacattcatcgcgattagaagctggggtgcgcaaatgcgaggggaggtaaggttagggagccacctacagaagccatgggggtgttgaattagatcgatgtgaatggtaggatgtgaagtgtagaaaaggatgaaggtggtgtcgaggggaaaaagatgtcgaggattcactttctcatcgatgaagcagcaggcgtgacatgaagattaggtaagccgcccctgggtggacctctacaaacaacactctttatatgtccatgcatgggacctttgaactgattaagttgattcaatggattatattgactagtttgactgatttgactacattttattactcttgactgtttttagaatgtggtacttttgtgttttttccacattgggccgagatattatcatagagcatgatctcgtcctgagctcgtgaagtctaacattggtgagacagtccctcctcgcccgatcatccggggtgagtactctatgtaagctgtgagagatagactgaaggaccctaaatcctatcccaagatgtctcttgactatcaggtatcaggcatgtaggtcacgacaatccatgtgtatcaaagttctttgatatgattcccaaacaggtattgctgcctatctaccatctctcccactggctccaacactgctccacgtcgacatgataaagattgaatggatcgagggcctttcagtgctaacaacgcaaaatgtcccccaacagtcggacgggccctacacaaaataggaactcctggctcatttccgtgcgcagaggttgcaacataccgatcagagaaaggccaattgtgttttccattggtcatgaacgaccataagtcatcgacgaactcgtccctggtgctcgtttcaaaggtaccagccagccacatattccaatccgatttggcccagtcttggcgattatcgagaggaacaccatattcaccgcgaacagatgtgaaaaagttacttcccatttgataggcagagtcgggaaatgtattcaagcccagcaatacatcagggaagagattatatggggtcttccaagtacctggccagtcaggatattccaaaacaaaatgtgtctggtctttgtctgttcctaagccttgctggaagaagatatttgcatgctggtcaccagcgcgggagtaaaccccatctccactcatctccccaaacgccttgaggccaactgcggccttgattgccagatttgtctcgttcgcgagaggtccagctgcatcatttgacgacagctgattggcaatattgacactattttccagcaagtaatttgcatacttctggaaaacctccatgtaatgcgcagaccagtcggtatcgccagtggctcgaacatacgcagcagctaaaataagcagatttccgcattcctcgattggcatcggctctgctttctggtcatcgtgcccaatagcatggggataatgagtgccaaggtcatgaatcgtgtatggcaaatgccagcgaccagcagcaaggtacttcataatgggctccagcaatagtcggatgtagtccggatccatgacgtagtaaatcgggaaggcgggcatgataacgtcgattgtgttggtatttccattgctagaaagctccttgatgaaagccaacacctcaccggtgtcgagagagtcattgggaattaccaagtcgatgcctccgtatgcttgccgggtcgaaagagctaggatatctgcatacttgggacccgcagcggcagaagataaggcgaccagctcccgatccagtttcaatgactctagcaatgcgttgctatagtcatccaagaagaatgagagggcgctcgatgtggtggggtactctgcacgatagaaaccagtgtatgcttctccaagatagttgatggcggcttctctttcgtacccgaccacgaagttcacagaatgcccaccagtgacgttaccaagattgtgagccagtgcgacaacacttccctcagcccaggtatcgtcctcaccagatagtttaccatcctcaccaaatagccttcgtacatcctcgggacttcccgagagagcggttaactgactcaagctagatgatcgagaggcgagaattgctgagccccaaagagccatgtcgtctgcctcggcatacagcggtgcgtcttcgaccgtgagcgagtaaatggctaggccgtcttgctcttcgaagtcgcgctgtgagtggctttttccgccagtccacctggcatcgatatctgaatagatctggatctcatggccgcgcgattcagctacctgtactgttaaataacctattctcccagtcagttgaggatatccacaatctaccatattgcacatcacccactaaaaggaagcgactgccgaacatagtttgacggtgacacaggcgacaagaaatccagcttaaatgccacgggtccagccgtaagatcaaatatcgaatgcgtagcggtaaattcagcgcgacgcaccgtcgcagggcggatattgcttacgcccatgtctggaacgcccatcagactatatgcctggccattcacacggacaatcacagaccagccgagctcttggccagcccagaactgaggttcagcatagggcaactgctgtactcggtcgctgggcatccatgccgatagatacgggttgcggactgctagcgggtaggacggtgggaggacagggtgatgcgttacggaactcgattcctggcccgagtagagggagagcatcgatgcatagagggggcctaagcccagtgagcttagactaaatcgcatgttgaaattggtgcatgtgttggaggttgaagagtgtgaccaaacgagccgggcgcatatattatgaatggcaatatccacggcctagatggaagtatattgaagtcagaaactgaactaaagaattccttgtcgatcttcctgcgtcatattggagggggcccccacagtacttacgcgttcgcaactatctacaacttcccaattcgccgcccactttcatcgaaatgaatatgctttccagacacgagcgcatcctagaggtaatgatcaatcccaacggtcttcacaatattggttaacttcataaaaaccggcgtgttccctaagcaatatcttcctcgaaggtagggctggaccgacctatgaggaactcatcaagtaatgccaccgttgtggtattagctggtaaagtttcgccgagggttgtcatccactgtcaacttgccctgagtgcctatttcaccggtatcctccccagcaaccatcatgcgctagtaatactaggcaatcatgccattccggaacatgccaacaaacacaccgttgcaccaggctgtagactcgtcgtaggagccggcgggatcgaacttgccacaacgctagccgtggataacggcaggtcgtccgatgagatatcgctcatcttggccggtacgaatcggcaacgtctagacaagtcgtacaccaccttcagatagggcttcttcttagcagcctagaccactgctttgcactttaaaagatattcatcaacatttgtcgtaacttcaaacaagaagaaaatacaccactttgatgtcgctggacagcggcttctcccggagaacgtgcaagtcttgctcgagcttgattgtcccctccgcgtgcacgtagccgtcgcaatcaacagcctgtagatcgggatgcttgggcatcttattgtggatgatgtactgggtcatactgtagggcgccaagttcagtccaacaccaaggctgagaacacggtattgaccgcacaccatagtctagtggcttgtgaattgagtttgcttttcgcgaagtattgcaccgacttggcagggggtatcattcagcatcccctcgaccaaagggctgcggaatcaccattgcaatccatgcatgcaaggaccagttggaatatgaacgcggtcagctaaagattgcacagtggcaagaggttgacgagagtatagatcaggagtgaaaaacaaaagagtaattcaggtcgataaagaccgatgactcagtaaaacgacccgaacatgaaggtgtcatggaaagtccatggaaaattcttccaagtctcccaaacaggtatgccaaaggggtctggtcaaggggaagatctcaatctcagggggagcatcgtacgtagtcacaccccacccctttctccattttacattatttaagtcaccgttgcgcttcgttttctttgattaattccacatatactacaacgtgcagaacaagaagtacttgatatcctctgtgatatcctctgcaagaccccggcgtcccctacgtcccgcccccgcaaaaacaacctcgcgctagcggaagatcagcattgtctcggagaaattgcaagcgacgcgcgtgacaggccatttgtttcgcctccggtctcaccttcaaacatgaacacaatcctcgcgttcttccacgggctagtcccaagatgtttacggaaatccgatgtcacaaattccgacgtctcgaggaatcactactatatacccgtcatgcaaagctcaaagtcccccatgagcgcaaccaaagagcataagatcatatcaattccgatttcatgcgcatccccgccttcttacaacgatgtaagcggcgccgttatcataaaccaggatggcaaacctcacttcctatcaccagaggaagaggtagagcgacgacaccgactgcagcaagcagtgcgcgagaaaatgttagggctaccacgaatgaccaagtttgaatggtatcacagaacatcgggaactacaggccctgtgagcgaggaactaccaccaccgctgtataccccccgagaagatgagaagaaatgacgtcataccaagtgctggatatgcagagtattgacagagcgttggattccctactcgtgagcaggatacagcccgcagtacactttatatagactgcaggggtctttgtatgataatgcaccgagggttcacctttgaatttcatggccttggctattatttatacaagaattgcattcgtagatgtatgcgaggctagttccggaacagtctcaagccaccttcctcccgatcaacatcatcctcttcatcgctgatatcttcatcaccttcaccgagcaagccgctggccgttttgccgagcagagaagcaaagaactcatctcgtgcgcgggtagaccaggaaccacggtcatcgggggccatgaagttttggagcttttcatgcacagtgtacttcattttgcggcccttggaagcacgggtatcaatatctcgcttcaccttatcgttgcgcatcccagtaatggggtgaataggcaggcgcgagggcaactggtgcaggttgtcaaagccactggtcatagaatcggctgaggacatgcgctgttcaacaagatcgcgcaaaagggactggtagaaagccccatcatcgtagagaggttcttgttgatcagatgtgcgcgaacgcttcgaggatcgttctccaatctctgtggcaacttgagcatcgagtacggctgtgatggtctgttgacgaccggaggtagaaccgagcagtttgcctctagcattaggaagagatgcagaagtgccacgaactttcgaggaccacttgtcgagaatggaacgacggtgcgaaatggactgagactccaattcagccatacgttcccatagcgaggtagagctggtggtaggcgaagcgggggagggtcgcttgcgctttttgctgccttctttggcggtggcatcggccagggcagtacgtaaaccttcgagggtcgaccataacgccagagccgctgactctgccgacttgattgcttcctcatcaacaacttcttcttcttgattcatctcgttctctccatctgcttcgttctttgaacccaacacagcagcaataccgttaatagaggtcaatccactctgaagcttcatccgcgcgttaaggagcgcatcaaaagtggtacgttgttgcttgacagcctttccctttgtagcatcggccttggctgccgaggagatcgtggcagcgatagttttctgatccgttgccattagtttccgaatctcgtcgcggtcaacagacggtccgcttgtgtcgccatgccggacatcttggagcgttttcttggagtgcttgtcgactacctcgtcggcatcctcatcatcctcatcatcctcttcgctctcttcgtcatcgtcatcctcgcctccctctgtgtcctcatcggaactctcctgggccagggcatcgtcgccactggcagattcttcggagccagacgagacatctgtgttctcgtcgccttcatcactttcggcgcctagtgccgcccggctgactcgggcaccatcatattgcttccccagtgggagggggtcatctttgcggagctttgctttcctgtttgattattagcgcgttgttgataccaaatacacatatctttacacacccaacagtttcataatgctctctgcctgccgtcacttcttctgtatcttcaccttcctcgtcacttgattgctgaccattatcgatatcctcgggatcaaaatctaagggcgaagttagcattgaatgtccagtactcaagaggatctgttatgcatcattcaggcatacctttaggagttggatcttcaaaatcagcaagctgatcagccagggaacgacctgcgcgtggtttacccatggtgtttggtatgaggagagaatgagagattgccgagcaacttttttactggtttttccggataacggattattattcctatctaggtttagcgcccgtaggcagtagaggttcatgtgggcggtgtacagcgtaagagcttcgactaaaggcggtcggcccttttcttggcagtatcgcagtggatatcttgcactacatattctagaactacttctgttgctcacagattattaggtcctgcatttttttcttctcatctgcctcatttggcctgtgagtatgttggttctgccgtctagctccatcactaggggtgcgaggcttttttctacatatcttgctcttcagcatgagaatcctttggttagttgttaatctacatttcagagctccggtggttgcctctcggctcactaattgactctaagaaccattctcatttgttacaagagctatttcaatttgcattgactgactatgaacagggacttccacgctctggtaccccgccaacttttcgttcgcgccgagggctgcctgagaagcgcaagattcgagatgttaacaaaattgttgcagtctcttcagcaaagggaggagttggaaagtctacaatagcgggtacgtagatattatcctcctatctaggcgcaagtgtgagcccaaatggaacaaacagtcgctaaagagatcttatcagtcaatctcgcactatcatttgcacgccgtggtatcaggactggaattcttgacaccgatatattcggtccttctatccccaccctccttaatctctccggcgaacctcgcctcgacgaaagtgagactccctttctaagcttaccaccatttcagccataatcaacatgcttatgaatattgccagacaactgcctcgttcctctaacgaactatggccttaaatcaatgtcaatgggctatctcctcccccaaacacaagccgacagcacaagtggcgagctacctatggacacaacaccaatctcatggcgcgggctaatggtaaccaaagccatgcaacaactccttcactcagtgtcgtggggaccactggacgttctaatcctcgacttaccgcccggaaccggcgacgtgcagctcacaatcaaccaagaaatcatcatcgatggggcagtgatcgtatccacgccgcaagatatcgcactccgcgacgcagtgcgcggcatcgggatgttccagcgaatggaagtgcccgtgctcggaatggtacgcaatatggcatatttcgcgtgtccacagtgcgggactcagacccgtatattttcgcatggtgatagccaccaccacgcgcacggtgagaaccacggcgtcgtggctgagtgcaagcggctcggagtggactttctcggtgacatccctctggatgctcgggtgtgcgaggatgctgatcgtggaatgccgactattgttgctgaggagaatgttgagcgcagtgcgaggcgggaggctttccttggtgttgctgagcaggtagctcggaagattggtcttgattggcactgaagggtcgactcatcttgcccagacgtagagttatgaacattgtgtattattatatcagactcccatatccggtggctggctactggctatttatctcggcattccgtttatctgggtatagactgtatttattctcagaactatgtacttccatctacaaatgatggtcgactgctagaggcctagtaattgactgcaaaaagggtatatccaacacaaggaaaataacaaaaggaaatgccaagtcgctgcacatagtttcaacaaaagagccagcaatcgaaggaaacttggacatatttaaaacgactgttcaagaggatacggatatgtccgtaaagcaattctacaaagcttactcggcggttttgaaaacctccctgtccggtatttcaggacggtgggatgtggagtctcgaccagccgcggagaaaacagatagagtatctgtggaaggacggccattctcgctaaccaagggggcaataataccccgcgcgccagtcacagcttgggtgctagcagtatcggatgccatgtttgtataggcgacggagtccttgtcgccgccaacggtactggtagtctccgacaacatttcgcttcggtcagcggctgatcctgcagcggatgatgaccggtacctgctgtgagctaaggaaagatcggatttcatcgggagagagcctgttgcgtgaaagagagccctcgtgctggcgttctcatccgtgaatttgtgattgttcaccccgggcaagataaggatcggagcagcacttttctgtgagacgggtcgagatgcagcctcggaatctgtagacatgcgtccaatagaagaatcgccgttactgaggcattcctttttatcctggttggctgccgtcggctgcgatttgttgtcggtgaggtctttatctgttctgctttggggattcgtcgctggagtgctagaccatgttccggcctgcccattatcagtgctgacacgggtggcacgtctgcccgattgctcgatccgattctccatttccattctgcgctcgtcatgtttgcttccccagccgctccacatcatcatgccgtagttcttcttggcatgtcgttttggtaggacgccaggagcagctcgccgggcggccaaagagctcgggggaggacattcgccatcaaagtcttggaagccatgcgccagctctatcaggcgtcgcctctgaacccgaagtttttccttcgaaaatctgatatcccattccttctttgcatccagccacattcgaatgagcacggggttgattgccccgatttgggcagggggaatttgtaacgatgggtaggaagagggagtgtctagcgggaagacatgtcctcgtttatcaattcgttggcgtatcatgtattgatggaacgctggaagaggatctccggccttaccgacagaggaaggcccacgtgcgttaggcagattggtcaatgcaggttgaggccccggcatatcttcatcttctgagctgtttgacgaaacgggcgaaagagcactatcatccataatatcgacctcgccgtgctgtgcacgcgccaaggcccaagagccgaactgggaaatggaacggaacatgtacttggctggtcgcgtaaagctcagagtgggagcgacatgacataggtcgtcccagacctgaagttgtacataagtcggttcgtacttgttcaaaatctcccgggtgggatcattctcatcgagatatacgtcgctcggtgggtatgccgatggattggccgctttgtgggcgatgtagaattgctcgtcacgaagcgtttcgccgccgccgctcaatatttgtagaggaggcaggccacccagagagggttgtaggactggcgaaacaagagggtgggacatgagctggttcgtcgtgtaaaactggatttggtccttgagttcgactgttttcccgcccaaggcaacgtgaatattatcgggttcggcatccaaactagcaggatccggggcttgctgctcgccagggtaggaatattcggctgcagggttctcatggatagtataaccgcggatagcagtctcttcagcactgctgcgcggttggggaatagccttattgagatcctcggaagtcactattggttggcgcgacagtcttttcatttccaggatatcatcagcattaggaggaggccaagcggacgagggtttatggcggaagccataggcaggaatataatcacctgggttgtcctgaacaatactcgggaaagagtgtgttaaatcaacccagggtgagatcaagatggcgcccgcgggtaagggaataccctggtctctcataacgaccagcatcgatagagccaagcctccgcccgcagagtcaccggcaagaatgatttcctttggttcataggacttgagcagccagagataagccgccatgcagtcatgcaaaccacatgggaaaggaaactgcggcgccagtcgatactccggtgcaaatacacgtcccttcagtttacgcgcatggcgctgcatcatgtaccgatgcgtgtcgacacttccgaagaaataggccccaccatggacatacagcatcacacggttacaatgcccaccggccccctccgtttgagcgtagtggctccgcatctcaatccactcccccttcatctcttcggatggcccgcgccattgccaccatttctctcctcccacccgtacgatacctttggggcccagctgctttttgacagcgtccgcagcagagcgcaagaactcgtccgggattgtgacggtctcggttctcacccaatgtggacttgggacccattggcgagtgaacgcctggaagtcttcgacggggtgtttggatgcataaaataggaattggcgaatgatatggataccttcatcgtaggtaatgtgaacggtgggtttgtcccgtaacgatttacgatgcaggtactatggatcatgcgctatcagcaagacaatccttaccctatcagggtattccacaacttacgtgactgatgagagtatgaaggacagtgggagtcaatgccacacctagtgcgactgtatgtaatggcataattgttctgttcggtggaaagagagtagcaggattctaactgtcgcaaaatccaaggaaaccaaaactaggaatcagacttaaatgaaagacaaaagcgaagatcggtcgcaaaatgggccgacgtcatttaaagagtgcaaggggattggaagaagaaaagaagaacatccaaacccaaacgagaggcgatgatgtcaccgggcctcggggaaaccgatctgcacctgacctccgatcacttaccccatacctccagcctttacaaattaggtctcctcggtcttccaatccaactgacattcacaatataaaccatggcgatgacaccagcaacaatactagttgcaatgaccgcccgatgcggtgctttcgcaagcttgaatccaagcccaacattgatgatacccagaatcatcatcaaccgtccaaaccagcgatgcgtataggcaaaaggtccttttctacctgtcttccggaagaatcgatgctgcaatacacccatagcaggctggaaaagaataaggcttggtacgatgatcatccctaggatggtatggtaagagttgaccaaatcaacctgtcgtgcgagggaaacaccaaccccaaagcccgcgattaccacggtcagagtgaggagttggaacgttccgtgaatgttcactgtccatttcgatgggaagagatgaagtccgagcgcgaagaaagggaacatgaccacaaaagccagaaccatgagcacagcatgggctgtctttttcctcttgactgttcgttgcaaggctgcaaatgccggatcttcactgggagagatgggcactcgggctatttgggcgaagggattcactgaactgccgcccgtcgcttttttcaggtcgacattcatgacaccgtaatcatcatgttgggtgataccctcagataaactgaccgaattcaggggctctccatatttaacggaccaaatccacggacttgaggggctgttcacgttttctgttcccccattccattttaggcaggtatcgcatcgaacattggcagtgataactccgtcgtgtacaccactaccattcagaatggtgatctgggcgtccttgttatacaacggttcaatttccccaacaccagaccgcggagaaacggtgaccttgttgccagacgtgtacacgacaaacatattggcgcctgccatttgcattccttggcccaaggcaaaccactgcacttggcgagtagaattcatttgaaagtatatggggcccgagcctgactcagcagtattgtcggggacattgaagctataggtgatctcactgtggccttgcggatgaatgctatgaacttgggccagggcaggaatggcccagagccaagcgaaaatatgccgaaccattgaaaaaaattgagattgacttatgatctaacaagggggtcatcccaataaataccctcagctctttgttgcacggttgacacaccaattgggctgcgtcaggccaagtctttgtggctgtgacttatgaatttcttacagacatttggaatacctgtcaattggttgaaatattatcttacacgatgtcgtcgttttgtgtctgagctacctaaagtcaaaggtaagacgactttgctgcgcctccccatgtcaaacatgatcagtgtcgggtcagccgcatcaattatcaaggctacggcaattctcagtgaggtcttattattggggacatatgagtggtcaaccgacattgatggctagagaaatgtccataaaattccggtgtgcctatgcttttggagtattcaaccgatgcagtaatggggaaataaagttaggcatagcttcaagcttatatctgtgtttatacgaggtcaagggtgtcatacgaggggaaaagaagacagttagttatacagcatctcatttactgtcaaactatctgtcaaactatctgtcgggataaggacgtcctctattgcaatgcataatgacgtcctctttgctcttgaattttccttctcgaacgcctagcaacgctacaattaaacctaccgatgaatacggcttcacccttgtctctcccaagaaaaggtcgaggttcatttcgacctgcagagtcattcagtgtccgaagcctttctttgtaacctctgctatcctatcgtagaaaagtgggttcgtcccaaccctgtctctactacatacttcttagactgataaccttacataatattgagacaatgcaggaagccccaaggtccctttccacgcggtacataacggcactctccacggagaatattcccacttttttaggaagatagacaaaatgagctcaaatgattgcagaggatattgtcgatcgcattctcgtccctttcttggcaacgcagaaggtccccaggaacgaagtgtgggatgcactaacaagttgaacataaaaactacaatccatttcagatgctgatgctgagctcaatcacagacaccatgcttggcaaatcatatttcgcagtggttatgatggccgctcaggctttgcctgtattcggagcgacgagggaacgagaaatggtcaaagtgacagtctccgagacggttcgaggtggtgaactagctaacattcacctcgactggcttggccaaccgccaactttgatcaaatctgtctatgcgccctgtgacaatgaacattcgttggcaaaagagcaaattatcggacagttttcatttcatggtcaccctccacagcgactggtttgggtggttccagatgaggctccgacgcaccattgtgtttacatatatgggtctggcggcccaaatatgacgcaaagggtcttaggcaaaagcagtcctgtctccttgcagaagaagcctaggaaacgatccacggcagacaccatcccattgctgaaggactttgatgcgcagggagcatggttcgacggagtggccaaaatcaaagacaaagtggaaagcagcggaggcgttgcttcaaaaggttcaccaaagaatacctcaatcgcaattgttggaggcgggatctccggacttgcaacgggtttgatgctggacagcgtcggtatacataactgggagatcatcgaagccagcgaccgcgttgggggcagattccggacgaaatatgtcgcggacactcaagagtgggctgagatgggaccgatgagacttccgtactctgtcacttacagagatgacaatgagaccctcctgtattctgatcatcagttgactttccaaatggccaacatcttgaacaacatgaacaagaatgactcgcagtggaggattgatttcatcccctggatccaacacagtcccaatgagttatatgctcaaggaactcgccgtcatcccgatggaagaatcccaactcgcgctgagatcgaggaggatccaagcctgaaggacccctcagaaatgacgagcgccgaatacagcaagaccgaggatcagatgaacaaaattctaaaagatgaaaagactctcaaatctcttcagaaggatgtctggagagcccacaagaccgccatggaccagggtctcgatgactggagcgaacaggcaatgatgcgacatgtcttcaaagccagtcagaacatcaccgacgggatctggacctcctccgactacgatgtattctgggacgagctgcatcataactccaatctcggcctagatggaagcaaggacagtctgggcgaaacaaaatggctctgcatcgatagaggattcaaccgcctgtccgaagcttttcttcctcacgtccgcgacaggcttactctcaatcgaaaagttcggaaactcgaatcagtcaagggcagtgatagtcacacccgcactcgactgtcatggtaccccaatgtctcgaatcgcacctttgagtccaaagagtacgactacacaatcatggcagcgccatttaccatgacccgcttcatggatctacccaaattctcctcggtcttagaccgcgcgatcagcgaagcaggtctacgcttcaagtccgcctgcaaagtagccctgttattctccgagcgattctgggaaaagggcgaccgaccgattttcggcggctactccaagccattaagtgactcagtcggtgcactctactaccccgtctacggactcaacgagtcccgcccgggtctgatcatgcactatcgaggcggcgattggagcgaccggtttgtgagtttctccgacgaagaacacgtccagacagtgctggattcgattgtcagcctgcacggtgaacaagcacgcgacctttacacgggtgattatgagcgcctctgctggcttcaggatgaatatactgcgacttcttggtgtcggccggatgttgcacaacatcaactatacattccggcttatcatcagacggagcataacaccattttcattggagagcacactgcgccaacgcaggcttgggttagttcctcgctgcattcttccgttcgtgggtcggttcagctgctgctggagttgggtttggtggatgaggcgaaagaacttaaccagcggtggatggggagatggatcaagctatgatgtttctgtcaagctccttggtttggagtatatcgtagcttactctaattaaaccattttcggtattttttaaaaagatttatgatagtatagtattaaaaccattatcgatgggggacagtgccggtaaaagctacgaatttactgaatacactcatagttggaagcgcttgaaaattaaattgcttagaaaacactagtacatgacgggcataagagggttgcaatgtaaagacagtcgaatagacattcgtggctccttgttgcgtattgagacgtgggcaccttttgtgcgggatgtgtgagcaatgaacaatcactcaatggtaatcttcttggtggtcgaggtagtggccttgggcacaataatagacagaatgccattggtgaggctggccttgaccttgtcctgatcgacactaacggggaaggagaaggtacgttggaattctccaaccgatcgctcgctggcccagtagcggtaagtgggctcagacttttgctcagacttttgctcagacttctgctcaacctcatcgccctgcgcttcagtctcgggcacagaggtgtggtactcgcgttccgcgcgacccttcacattcagggtctgggggtcggagaactcgatgtcgatatccttttgagagagaccaggtagctcgccgtcgaggtggtaagagtcatcgctttcgcggacgtcaaagcgaggggagaacgagcgagctgcaggctggctacgaccggagcggtggacatcatagtcgtcaaggagacgaaagaggggagcgaagtcactggaaccaggaaggctggcacgcaagagagacattttgttgaatagatcagatatgcttggagagcaggaagtagtgataacttggcttgtgaggatgtgttgatgatgaggaaaacggtgggtagttggggggcattatatagccagaggacctctcttctcgaaactaccctccatatttcaggcaatttctggaatataccacaattgcatcatgagataaactgcccggcttgttgtttccagctgtcagtttgttacttctccaagatactagatgcttctccacatttccaccacgtgacacgaaaccatagggctatttttggttcaagaagcaagaacggaaacaaataaaagaagaatataaacttagggcttatgtgaaggccaatcagaacagttgtcaaacaagtataatgctgcttatatccgacgccctatgtctatatacagttaaggcattaaaacattcaaatgccagagatccattgccaagaggggttggagaacaagtcttataaagagacccgaataatagaataatagaataatagtaaaataaaaaaaaagaagagggatgtagaatcttaatgcacagaaagggtcatcggcgcggtacaatcaggctatagaggcttagaatgacgggctagggctacttaactttgctggagtatgcggagcaactcgaacgtgcgttcgtacaacagcagtgttggacattaaagacggacgaaatagtcgggatgtctgttgctttccaacttacttcaattttcaacatagtttgttaggattgctagcattttggagaaactcctctcttgcgctgtgattggtgacttcccaatatttctaggcgcctaatatttcaggctccattctaacccggtcaagtctggcagaatctcggcttggccaatttcgtccctcttaagatcaattatcagttcactctgcacttttgtctgactggctcggattgaatgagataaatctgacactaaaagactgtctcgtcgactttaaatcatcggtccattggctcatagactccctcggcggtgaacgccgaagtgcagtgcctaccaatccctgccgtccacgtttgggctcgattaggcaagaaatacacatattgctccttccataactctccgtacacccgagtcaccacaaatttggtaaacaacacgtcaatccctctcttatctatcatggcttcacccacagcagccgttgacaagttatttgtctgtcctggatgtcagagaggtggcttcaaaagcatgggtgctgtcaaggctcattttgagtctaagggccacaaactcgcttgcagtccatgcgacaaatcttttgggaatgtaacggcgttgctcaagcactcccagaagcatgaaaagcccctagatggttccgatctcaagtcggtcaagtcggccaaaccagcaccaaagagcacgaagcaacagaggttcccggatctgtctgagtcttttgttaaagctgcaaacccaccgcccaagatcacgaagcctaaaaggtcacaggatccttctgagcccttgtctgtcaaccctgcaaaatccattgcaaagaaaacaaagcctgagaagtcacaggaattgcttgcgtctttggctgccaaacctgcgaaacccattcccaaaaaaattaagtttgagaagtccctagatcggtctgaaataatgcccgccaagtctgcgaaaccagctcaaaagcacacatcaaaccaggcatcagtaggtgctccattaaggacagacgattttgaagacctatggaccaagacttctgaacccctgaacatctcatcgcctgccatccaaaatgccaattaccatgttttgctcgagccgctcgagcaaaatttgatctttcgctacttgtcggctcgatgtcactcggacacccgtctggtcacacgaggctttacctttcgggatagcttggcagatgtcagcaggcgcccgtcgaagaagccctctccaaagacaggacatttccgccaagttcctcgcccctccgacaacttgccgagaaggagagcaatcgttcttgactgtgagatggtgcaagtcgaagcagggcgtcgggagcttgcttttttaagcgcgattgactttttgactggcgaggttctcatcgacaactatgtacagccgaaatcgagagtggtgaattgggattctcggttcagtggggtgactcctagtgccatgaacaaagctgtcaggaaagggacagcgttgtttggctgggaagaagcgcgctcgaaattatgggagttcatggacagcgagactatcctcattggtcattctctcaacaatgatcttgacgtcttgggtatcattcactggaacattgtcgactcctctatcattaccagcgaagcggtgttttacactgtacacgccggtgaaccactcaaccgcacatggagtctgaagactctgaccaatgaattggtcaattatgatatccaagtcgggaaacagggccacagtgcgctagaggatgcacatgcaacacgggatattgtgatctggtgtctgagatacccagagcacctgaaggtatgggcggacaatgcccgggatcaagaggagcagcgcatgtacgagagggaattgaagaggacgaccgaggagcaggtcagggagcaaagaagacaacatgatatggagataaagatgcaactgttatctcaaggcgttggtggtttgggtcttcatggcattggcctctctgatgatgatgccaatgaccctgattcttctttcgtcgaccgtgatggtgacgttgaatacgaatcggtaactattgaagcggctgctgtttcattcttctgatactaccatgtctataagtatctgttaattatgatgttatatgataattcaattacaagtattcagccgtgcaatcattgcgctaatcgcccttgctctccttctcttataatattcgacaagggatatgccttcgcgatgcaaaattacaggagcgaatcctatccacaagtcgatgccactcaaattcaaaaggccatggcctcaaccaaccgcaacctcacagcctggatgcactgttatacacagtgacctctgcagtcatcgacaccgttcgtgtctccccagcaatactaagagaggtctgccatatgatcgagtgactcaacctggtattgaaagtgacaaaactaggctggatgctagccacaagactgagacgcttcccatcactcatcagaccatcgtgtccaagaacaagccgaagtaccctcccaatatcaacgggagtatcattcggcccagcaaaagttacaataggatccttgagctgctcaaacgctttctccagccccaaatgctgaacaaagacatgttcatcattaggaatggtataaaggctctcctcgctcggtttgagaacaatctccactttcgaaagaatactcatcttaaccgccgtaacctcgacccgttgcacaacatcccaaatcgcactactactcccgtcccgccgcggaataaccctgataagaagcggaatcggcgacgagttatcgagttgaatcgcaaccggcacacccatcacaacctcaaagctgaatccaggaacggaagacaacccaagaatcttctgcgtcttctgcgtcaaggataaccccacatcccgcatcgacggcagcagtcgctggctgcgcacccggctcacgatactgcaccgctgcagcgcaaaccggatcccgcccgcgtcgacgttcggatgggccagcgtgacgggcgctgtcgcgcgctgcacccgccacgacccattgcgcatataccgcagctgcgcctggagatagtactcgatgcagaccttcgccccgctccattcggtgtaaaacgttccgggtaacgggtgttgcgtgatgcagcttgcttctagggggacgaagctctcttcttgtgagtggtcgcgcactgctgagagcgaagctgcttcggggatattaattgagaaggggatgttgatccagtcggttggggtgctgggggagggtatgtggataggtccacgtaacagggtctgtgggggcaagtggaaaagcttccagttgccgtggcttgtggtttttgttgggtagccttctgttattaagcgggcttttgtacgcccgatcaatgtaagtgcgatcttggcgtctggggccacgaggtgcgagtggcggttcacgctgccgattattgtatcccctgcggcgtatgtccatattggaggcgccgcgatggatatattgaggttaggacctccggttgcctgggtgggatgcatggcttcatggtggagggggaaattctttgaaaggaatttcggtcaagccactagtttcttacataactcaggcagggggctaggctattagccaaaataaggccgttagctgtcacaaatatggaattgcgaattgtggagatgagctctgcaaggatagtatggggtagacgggtcaggcaaaggcaagcggggatgtcgagggaaactcccatagctcacattccgatacagtggctgtagggaaagaaataaaccctatgagttgaatcatatctctcttgctacatggtttttgcctgttaacctcgacctcgacctcgactttgtttgtgcacttccaaggttgccagccaggcccacttttagtcgtaactccagatgaactaaccaggtagttaacaactattaactaactaggtcagattaatgaactacatggacagaggcataagtcgagttttcttgtaacacctacatatgttgggaggcagacataatcgttcgaagcgatgcaccaattctccatcaactacacatacctctgaccatctatactacctacaacgattaagacaaaatactacaacatacggtgtacccaagcaaataccagaatcaaaatcaataaatccgggtatcaaattcgcactcgaaagtgcatacatacaacctcctctcgcagacaaagttcatacatacaagtacagttccaaggcaggtcgagaatcccaccagctcactataaagtagacaagacaagtcgaaagtctcgagtcgagcaggggggatcctcaatcagaccccgataacctacaagacacaataacaaaaaggatgcacgtcgaaataatttcgaggtcactgtgcgcccgctcagacgccgtgtaaaaataaaagccaaccaagacgccgcgtgcatcaacgatgcggaatgtgtatagtcgtagccaccagtgacggagataatatcagcatgtgaaggggtaaaagtaaagtaaaggtgcggtcgttccacgtattcccggtgtacacccatgtaccgagagtggagggtatcatgtagcgtgggataatatttcaaggtagggaggtgatgcagctttcgtgaagctgacaatgagatgtatcactcattggcctgctcgattctggcaggctgttgggagtcattatgacttccgggctctgcagagccatgaccgccaccatttgcaaactccgagaacggcggtgcggccgtcgtcctttcgctcggtgccgtccgggttacctaggaccatggagaagacccagaaaaatgcggctgtccatgcgaagaggaggatcacaatgctgagtaacggggataggagcagtacgaagattgaactagtcacggcatagacctcgctcggctcggatagcactgacggctggtctgaatctggctctgagcggatccattgggtcgattgggtcgatgacgatcggtcttccactgatggtggctgcaagcaaacgagccgttcgtggatgtggaggataggagaaaggagatcgcaaagttgtgatgcgaacgtcgttgcgcagaggtatggagaaaatgagcagaggcggaaaggtgaaacaaagagtgcgaagaggagggcgaatatagtgtatagagtagcgccgagtgagtagaatgggatgatagtgagacggaactgccaatttgtattagcatagaagtattagaccgctatattgcgcacgtaccagcattagaagagcatcctggccctcattggtgattatctcaacattcgaaatgggtcgttttcggacacgggttatgctcgggttggaaagttcccccgacattactgacggctggtctgcccagctgcttgtcgcccgctcttctttgtgtgcaccacttaatgtcgagccgccatcccgagcatctgagccgggccaggcagttcctcccagtgtctgagtatggtacacacggtgttgccgtgatccggaggtgcggggactggcatcgcggcttggtataggagaggaggttcgagattcgcctacagggtgacccaatacggaggactgttcttgggaatgacgggtagccggaggtggggtaacgatcgagctgcgagggtttggtccttgatcgtgatagtaggcgggactatatgacatctccggggaccgcatggcgggcgaggatataaaaggcaagaggtgaagacggagcaagagtcgtacaaggtagacgcacagagggcgactattgcatgtagaattcaccgcatggtttccgtaatcgtgatctttctggcataaggggctctcagtggacaagttggagggtgaagggggtgggcagagagggcggaagagagacttataagagagcacggagagccgcagcttgaaagagcggaaaagccaggaaaggccaggaaaggccgtgtcaggcagcggaagagcatttcctgctgtttgcaatccctctcgccaagacgcccagatgccgagcccttggcattgagttgagcacaataatcatttgtgggtatgctgctgatccttttatctcagatcccgatcatggctatattcggcctgttcgataacagggtagggttgtgttggacaagatgtgcagctgtcctaccatgagaccaaagatgctgagcggcctaggggtcaaaggatgaattacgacattttaccacctgccaagacgccaagccgccatcggggttgataagtcgactattcccggcctctgattggtcaaccgtggcgagatgatccgcgctgagacgagggctggagtcttggcggtaacagccgtacgcacgtgatgacatgtattgctcctattgcccaatgtatataatcctggcatcttccaatgtgacggagagatgttcacgttgtatgatatgtgatctactactcagagaagtgagctgagcagaacctcacagggctactatatacacgggtgcgtaccgccaaatcagggggtcaacacggtactccccaaagaggagacgcccagaggtcggcgggtgttggcattcgatttcggagaaatattctcagattcctcagtatctcttacctaactttccccaatgattgtcctgggtttgccaagggatagtattggccaatatagatactccgtacgggatacctatctgatatccttgccagacaggaagagtcttggaagtcttggctttctgaccctttcattccgctgctccgtcgagatgaatccgattatctcagcgaatcaacacatccgacgtccgcctcagatccagaatttgctttcccctcgatgaatttcagctcttggcttgtagggtttttctgtctggatgtctgggcactgtatacaaaaccgtattctctgcttggctgccccggtgagcggtcaagagtgactcattgcgcgttctgtgctcggcaaccctctgtcgagactgttggtttccctttatttacggctgcacgctgtccaaactcccttggctgtcagtctttaccaagaatcatgcgcctttcctcaaactcagcccatgagcaaccacacatctgccatcagccaagcacgcaaaggcatggcataacaatgacaggtggcgagtgcagatctatcatatccccgaaatccgggcgctgttctaaaccacctaacatgagtggtcgtggcctgctcgtgcgctggccatggatcaccgtcaaaaatgatcgactcttccatatctctcaaatctcacagatatccggtcgaccgatttttctatcattggtcgcatattccgctggaaaagacaggtaagatgttatatatgaagacactttcccccctcaacccctcgcagagctgagatcgttatctccaagcaaatctcttctgagcagctctcccggctattcatccacgagtcaccacccacgccccacggcatatatacgttcagcttccttccagagctttcctcacccatatggttgttttgcactgatgtttccagcatattgtccatatcgcaagctcatcgaacccacgatgaatcttcgccggcactgtcgaatcgcataatcattcagaacgtgagattcaggagcttggaaacaaattaccgaagctgtcactaaaattccgaacggcatctcgctattcttcgccaattttagcattacttacaaaggatttgtgcatgcttatgcgctcgatccttaatcttcggttccttgtactggcttacaaatggctcttttctggacctgcccgtggttcctttactccgtactgaatttctgcatctcaaccaaactgacgaaccccgagttgataaagtatatcctacgtcatagactctccatcatggctaagacgcgttcttggtgtccacggggaccctttctttgtgtacgttgtatggatttcatactatttgttccaccttggtattatcttgaatatatcttcaaacactctgcaaatgaggtttcctactccagacatccaagctacaggtggtcacgtgctcatccattgggaaggttggcttttaaacagttgaaagaaatatgaatttaagtgctttttcttttattgctgagatgtgtagtcctcgatcggaatgttgtataatcgccgcacagagaagtgattcaaattccgaattgaggactcgaattcatagcgaatatataatgccgatctgaggtttcgaatgcaacaagcgatccccaaaaactcctaattcaaaattgaagtagtttatatgttcaatagtctatactctagtaaccccactcacaaaaaataatccaggttcccccattcgtggctgacgggggcttgcagccacaagtgatcaagatgtgatgcaaccagccgactcagcccgcatcaatcactgcttggtcttattggctcaacggtacctgaaaggacccgggccgcgttgagggcttgccttggggtaatgcaactatgagaccatagacccgatcctttaaacctaacatcaaatgataagcatcctcccaggtcatcatacacgactagacttatatccctcgggcctcatcgccaacacatagcaacacagacatgttacccaacagaaagtacctgacacaagaagtatctgtgccccacgtcctggaacgcatctgcatcgagcccggttggaaatggcgcactcttaggccaaccttggaatctccccacgatccctatcttatcactgatcggggagggtagaaaatggacgcatctgttctggcgttttggtctttgtcgaggtcatacaaatcgaacatctgtctctcccaactagaccggtcttcaatccctgcactctggactatcaggtcttggcaagacatgacttgaaactttatgttttatttttttggctttgagttgccttgcttttttaatttcctcatacgatgtgactggcgatgggcgtgtgatattcactgcgaggtagagtgtggtctaccgttgaccgtgcagatacgccacgcccgagaagaactcaatttgaggatacgtatacaacagtttgtatggatttgcttgacggcgctctttcactggtcaactcggaagcgccagtgatttctattcctgtccattctagccttgttccctggcccacacacccccctgcctcgattctaactctggaatcgtgtcgcacggtcatacccaccgcctcggagcatggcgtctgcgaaatcccgtcgcagggggcgttggttcttactatttatttacggtctcaggatagaagtcatgggggtctccacagtggacacagcgatgggaccgcgatgcagaggcatgcgcgcggctgatctgtctctggtcgggccattactgtgatcccggcggtgcttttgcttgcttttgacatgcttccgagatttgcatttacagtgaaggtgttttttgaagattatatattctgcactgatcaaccaaagctcggcgagaataccgaatccaagatggtagaggttgagacagggaatgaaagagaaagaaaaagaaaaagaaaatatcaattactgcaagtcacaggttttgactcggtcggcaagtcgaaataacaagctgcgtaaccccagagatctctaggaaccatatacaaaagatagttcaaccgaggctgttttctccgtctcacaacccccaacggcaaagacggcggctcggctagcaaaccctgatggaaatgaggcgtacccacgcacaagtggagtccatcattgggagaaaataaggtacacacgttcttcaagccacgtatgttggatacctacgtaggtaggtcttgcaaatgtactttagatgagacaatggtcagcatatcagtacaccgcaagggccgcgacaacagaattccacagcgtcgtcgcggttgtcatatccgggagtctcccgaggtccactggaaaatgtgtaatcaagatcggcgcatccacaggcatgcaccagccacaagcacagggccatttttcctgtggctgacgaaaatttaaaatgaaataagctgtggatacacgctaagccgcttaaagcgggtacaataatgacggaaggggcgaatatgcaagtcaaggtaccctgcatggggactccaaacaaacccatgggctttgaagggggtgcgacttggattgtatacaatatactccggagaaaaatgggaaaaaaaggagaggggacacagggtcactcgacagctgcaccctgcacagttccgggtttggtctgtctgtgctggtcttgcaggccattgacgtagacggagtacggagtacatccggaggaattagctctatattccatggctagatacggacagatcgcataaagtacgaagaccgggacaaagaaaatcaagtcactaagaatgatccccggaggtagtctccgttctcatttgacgggggattaagtacggacagtctaaagtgctgggcaaaagggggggggaacaaggatctgagaaagccaatgcggctgcacggccctgtgggctacatagcaccacggagcacagtcgcactaacgcaccttagaggcaaccacggggggagtccccactcggcgccttttgccgggggtttgtgtgtttgtgttttgagagagattgggcattatgaattcattaaaaggggagagactatgagttagagtacatttctatacttctagaaactgcccatagaataaataaccataactcttcttatatgcttaattctctcatgagatcatgggtgggttttgaccaagaaaggaaaaaagaaaaaaaagaaaaagccaaaaaaggagaaaagaaaattcaaaaaacccaaaacgggccagaaaataataaaaaagaaaaaaagaaaaccagcataaccgcctccagatctttctccacaacgctaagccgttcctgagtgtcagcttggcttatataatccgtcgtgacggtcggagctacccaaccactagcgtctcttggcgaatttcacctttcctgccagcccctcgactcttccctctctcttccccccttaggcattcggatcatcttcaatactgacttcccctttccccactgtatcgccttgtatcttcgcctctttcttcaatcctttatttttgctcgtctaccctcgcgcaccaagctcgacatagctgtgacctaacccgctgccccgagattgtgtcactgccatatcgcgccactcatatatcgtcgggacagcgccaaggtctagtcgattttggaaaactgccgccattcacggcttgatagtgtcgcgtgagggaccgtgacttctttcgcgacccgttgtttttttttttttaccttgttcctagtcgatcggaaattgcgcctccggattggcgtgcgatatcacacgagcacacttgatcggtgtctaatagtggtgtgaacttggattgcatcatcgtgtcgcaaacctaccccgagagttcggtcgcgacacggttcaactcaaaccatattcacgattctcgggaaccatgtctcatactcaaccatcgcccaccacgggcgtggctcctcaccatgccgcagcgcatctcgctcatgcgcaagcgcaggcgcaggccaatggtcatatgtctgcaattcccgtgcaaggtcaaaagggagtccctactctcaccaccgcgcaaaagatcgccacactcaatgaacaagtctggcttcaaataggtaaatattcccgatcctcataatttggcgaatcctgacagcctcgtttgtaggaagcttgaccgaattgatgggcgatctggagggtgcgatgaatgcctacgagcaggctctgcgtcacaaccagtggtctatctcagcgatgaatgccatttcatgcattctccggacaaaggagcagtttccaaaagcaattgagtacttgcaaaatattttgaagttggatccgagcaatggcgagacttggggcagcctgggccactgccatcttatgatggataatttacaagaggcatacacctcttaccagcaagccctttaccacttgcgtgaccccaaagtaagccgttttcccttaacattttccctcgaatatttctctgattcaattctctcattaggaacccaagctgtggtatggaatcggtatattgtatgatcgctatggctctctggatcacgcggaagaggctttctcgcaagtgatgcgcatggcacctgatttcgaaaaggctaatgagatctacttccgcctgggaatcatatacaagcagcagcagaagtttaatcagagtttggaggtatgtgaaatctcttcatatgagcgagagctgtcactaactcatcctagtgcttcaaatacattgttagcgatcctccacgccctctgaccgaagaagacatctggttccagattggccatgtccacgagcaacagaaagacgtaagtcatgcttccctacactcttgattaccttgtactcattcaatcctcagtttgaatctgcccaatccgcgtaccagcgcgtcctggagcgagatccaaaccacgccaaggttctccagcaacttggttggctctatcaccagcagagtaatgctttccaaagccaggagaaggccattcagttcctggaaaagtcggtcaatgctggtaagtcacaatccccaggactatatacattgaaactaattcatcctttccctagataacaatgacgctcaaagctggtatctccttggtcgttgctacatgtccatggcgaaataccccaaggcgtatgaagcctatcagcaagcggtctatcgcgacggccgcaaccctaccttctggtgctcgattggtgttctttactaccagatcaaccaatatcgcgatgccctcgatgcttactctcgtgcgatccgcctgaacccttacatttcagaggtctggtatgacctgggcactttgtacgaatcatgcaacaaccagattgccgatgctctggatgcctacggacgcgccgcagatcttgacccgagcaacgttcacatcaaggctcgtctgcagcttcttcaaagccagttgtctgctggcacggctggacaacagccaccctctgcccccgcgcctcagccgcaggatgttcatcctcaggcttatcaggcacctggcgttggtgcacctccagctcctcagtggggtgcaccagcccccatcggtccccctccacaagctcctgcacccccgagacagattcctgactggaaccgtgggatcaacgagcttcagtctcaaaatcaagctcccccatctaacggccttgaccagcgcgacgctcggatccccggtgctcccgctcaaagccctcgacaggagcctggtcggtcgttcccggatccccgtggcgcgcctcgctcgccaaagatgggtgatcccaactcctacccgccgcctcacactctaccccagcttggaaatgcgcctggtccaagccacgaacgcgctcctagtggcagcaatgcctttggtgctccgcgtggtgctctgccgagtggcctgcccgtcgctcctcctggtccccctggacctcctggacccaatggcggtgctcctccccctccttaccagaaccgccctttcagtcctgctcctgagattcgccctattcgcgaggagcgtccctcttcgccaggttcaggataccccctccaacagttccaccccggtcctaccctccccccacaagttccaggtggtaactccatcgcctctggtgccccggcccctgcttcggctgccactgctgctgaggctgccgcccgtgatcgcgaagatcgccccgcatctgcaatgaagcgcggccgcgaatgggaagctgatgctggcccagtcaagaagcatgcaaatgaagagagccgcgctcgtctggatgaccagaataaccgccgcccgagcccacccgctcgtttgccttctcctggtgagatgcaacgacgaagctcctcagaggcccgccgcgaggacgcccgtcgtgccaatgagaactatcacccctcagaagctgctcaccaccctcctactctgccttcgatccaagacatgcctccccgtccttctgctggccccagtcttcccccgatggccgagagctctgcacctgcacctaacgctccccccactggacctccttccgccaacaccccggtcaaggaagaagctcctcgtcctgaggctccccctgcacacgagccccccgcgcgtaagatggatgtcgatgaagactacgatgatgaagttgaggaagagaagaaggctgctgcttctaagggcagccccaacggcagcactgctggcaaccccgccaatggtgctggaaatgcccgtgccagtactccatccaagatcgagcctacggcataaaaatgattcctctcccaaccagactagtgtctggctaatcctggcaaagccgattccttgcttctcccttcctatctttcagtgtgtgatgtacggtatgaatgtgcgagttacgctgactgcgtagtttcaagcgcgtgcgctgaatactcatgtctgttcgttctcttcttatgatttcttagtctcctttcactgtgaatttttaatggtgcattaggcacccttgaagcaaaacatttgtttgatactctgaaatttggtagagtaaattcataatgtctcctttttttccctctgtaaggtccatatctcattccagcccacaatgtggatgtcctaaaaccatattttgctggccgtttgccttggcagcaggaagacccataaaactcgtgggcccggaaaatctggacagcacgtgactggaccagggctggattagataatttgggttattgtggggtgcctcaggctcagatccgccaagagtctcgcttaggttagcccacacaccaagcgtgcaaaatcaacttcgacatttccagatcgtcctcccaccacctcgacgactaacgataacagggtcaagatgtgagtctctcccgattgaagattcctatacaatcgccattgaatacaattgctgacctgctttcgtctttcaggagtcaccggaagttcgaagcgcctcgtcacggttcgtgatcacctttttcctcgatatcgaaatttcgaaatacggccactgtgtgtgtacagtatactgattatatctccaggctccctcgcctacctgccgcgcaagcgcgctgcccgtcaccgtggtaaggttaagaggtcagtactctggaagaatttgtgatttgtggatttgtgtgctgagactttttgcgacagcttccccaaggatgacgccaagaagcccgtccaccttactgcctccatgggctacaaggctggtatgaccaccgtcgtccgtgaccttgaccgtcctggtgccaagatgcacaagaaggagattgtcgaggccgtcaccgtcatcgagacccctcctgtacgttttccccgttgtgtgcgaaagtgaaggagacacaaaaaagaagggaccggaacctaatatctttttttccagctcgttgccgtcggtgtcgtcggttacatcgagactccccgtggtctccgctctctcaccaccgtctgggctgagcacctcagcgatgaggtcaagcgtcgcttctacaagaactggtacaagtccaagaagaaggccttcaccaagtacgccaagtcccacgccgagagctccggtgcctccatcacccgcgagcttgagcgcatccagaagtactgcactgtcgtccgtgtgctcgcccacactcagattcgtcagactcctatcaagcagaagaaggcccaccttatggagatccaggtcaacggtggctccgtcgccgacaaggtcgaattcgcccgcaacctcttcgagaagaccatcgacatcgactccgtcttcgagaaggacgaggtgattgatgtcatcgccgtcaccaagggtcacggtttctccggtgttacttcccgttggggaaccaccaagctgccccgcaagactcacaagggtctgcgcaaggtcgcctgtattggtgcttggcaccctaaccacgtccagtggactgtggcccgtgccggtcaggacggttaccaccaccgtacctcttgcaaccacaagatcttccgcattggaaagggtaccgatgaggctaacgcctccactgagttcgacatctccaagaagcagatcaccccgtatgttcccccctgatattttctgtgtgttttttaattctaacatttctctagtatgggtggtttcgtccactacggtgaggtcaagaacgacttcgtcatggtcaagggctccgttcccggtgtcaagaagcgtgttatgactctgcgcaagactctgtacccccagacttcccgccgggccaccgagaaggtcgagctcaagtggatcgatacctcttccaagttcggtcacggtgctttccagaccttcgaggagaagaaggccttcatgggtaccctcaagaaggaccttgtggagactgtttaagatgtttaagcctatggttggcggtagtgcgacgtttcatattcaataaaaaagcgaatatccttcacgatttgcatgtagatgtatactgtctagatttataaattcattccagtgtatggagaattctccttcaatgatatatttcttaaatcgatattttccgttgcttgatatatatctggttgggatgttgtacgcagccgaaatgttcagctggtcttttctttcccttccatatatctatcttgattacatcccctaaaattatcctcactctctttactcctcccaatataccatactccaatccgacaagcgggtggtgaacaaaatgcgccagtccaagattcattgcgtcatcccacacctttccctgccagccccgacaagaaaacgggctttgccaatctcatcctacactctacgatcaaccttccaaagagaacatccacaacaccaataccgtcttctacatcatctatataaccaaaccagcctaagaacccaccccacaaacgcagcgcaccaaacccgcttcttccccgcaacctcaagaccgcacccacaaaccagctcttcccccaccaagtcccccttctcaacctcaacacaagccatgtcctccgacgacgcctacatgtcctttctggacaaagcgaacgcagatgtgagcggcagcgccccacagcaagggaccggcaccgtcaaaaccgagaccgtgcacagctccctgtcagtgccaaaggcgctccagtccgtcgacgcatactacatctcagatacagacgagcccttcgagcctgtggcattgaagtgggatggcgctgccaagggagcgtggcctagtgctggtatgttcctgatcctgatcctccttcatgaacttactcccttgaaaacctgagacaaaatctacaaccaccctgctaaccaccctccctcactgcagaccagctctcctccctgatctccccagacagcgacctgtcccagtccatctccattctatccccctcctccttcgacccaaaaaatcagtactctgccgctctagatgctgtccgcgccgcggctgtcgagaaggattctggtgcagataagtcagccgttgagctgaaggtctatcgtgttgaacaaactagtaccaagatcgagtactgggttctggcactacatgcgcctgagagccgtcttgtcggtttgcgcgccaaggctgttgagtcgtaggtgtccagactatatccataatgagaggtcttggggtcagtataagacataatattggttttgctatttgtctattctaccgaaatatgatatttttatgagaaagatcggtacggatttcgtgctgccttgttttttcgatatagaagcactggcgcggaatggataaacagggacctcatcctactttgcccttggtataagttggccctgacaggtttttgttcgggatttgtcgcattcttaagccccggggttggggtttgaggacgcgtgtcaatggctgtggaaacaagttgaattggattggtcaattaatgttgaaaggaacaacactggtaactagtcttgtacgtcgctgtttgtgttcaaaggaatcatatgtagatttatctagttgtatgttgtatatcgcgctggtagccggggtctcgggccatgtctctcatcttcctcgccgattcgccctttgcttcaacaacaccccgtgcatctatcggagcaactttaactgccattattactgtatttggacctctccaggttcatgaccgtggtgatccccgaattccagctagcattcatgccgggccattccttgggccctggggagcaacggaaatgccgcaccctagaatagccctacctagggcatgggagctaggatagggcttcagaccatcagcctatttcaatcaatcgaagcagacagtcaatgatataacgaagatgtcttgagctatcaaactgagtcttgaatagtatctactatcatccacggtccatcccaaaggctcgggaaaagagaggcataggcataccactggttgcccccttggacctctgtcattcctgtctcctcgtgagcccaaacaagacccctcgggccatctaggctcttcttttcttctgtgtttttggccttctttctccgttcagactctgtctcttttatcgtcgccgagggaaattcgatgctatccgacctgcgttcgttctttcgctaaaatattgcactcgtcgactgtgcaatataccagctttggtcttcagtctttaccgttgaaataattaggaaatcgctgggtgacgaatcggaagaaagaagaagcagaacatcacacccatctgctctgcaaatcccaccaacgactgatacaaaagggctgttctcgcggcggaattgaaggcacagcaaggcctcaccagtacagagcagagagtcgtgtcggacttacccaggaaacttgaaaatcgatcaaatgtcggaccacggctctgatacctcagaggggaaggcgatgcctcacatccgactcaactccgggcggcaggatcctttcctcgagtcaaatgaaggctatgcgcctctcacatcgcggacatttccccggcccttgacaccacagggagccgaagcgcctatgccggtgagccctcaagcgatatcaccatacggcgtatcagctgcccccgagtcctcggaattcctgctgcccccgaagttgaggcctacacagggacatggtctgactgacactgaccggaaccggtctccggatcggtggtctacggctcgctcgagtatcagctccatgagccgcgagagcactctccactttgatccgttccaggactcgagggcgccttcgcacgctggtagtgaggattatgatgtcaacacgcagactgtgtccgggaagttcaatatcatgcccactgatggattgttattgtaccccgaggacgtggagaaggatgactacttgcacaacccggacccggcggacaaggatcgtgattgtgacatctggaatcgacggggtattttgaatgtcggtggcctggcggttttcacaataggtcttctggtgctgttcattggctacccgctcatgtaagaagttgctggcttatctgactgtctctccatggctaacagtaattgcagaacttggttggcgggctttgggaaacatccccatgaaggtatatgccaccctgaagacacgttgtgtttggatgttggagagcgaccattgttgggaaacctgcgccagagcttgattgatccagacacaccgaaagaggcatacaccaagaaaagcgccaatggaaaggagatgaagctagtagtgagttatttcataggtcgacaatgagaagtggctgacgttccattgtagttctccgacgagttcaacatgcccggtcgaacgttcttcgaggacgatgacccattcttccaagcagtggatttatggtacggagtgacacaggacaaagaggttagtataaaccatgtcacaaatcatcgctcaatcgctgacattgcctagtggtatgatcccgacgcagtaaccacagcagaaggcacccttcagcttcgattcgatcacttcaaaaaccacaatctcgagtatcgatccggtatggtacaaagctggaacaagttgtgcttcaagggaggccgtctcgaagccagcatgtccctcccgggcgatggacatatccaagggttctggcctggcttctgggcaatgggtaatctggctcgtcctggctatgctgctaccaccgatggtatgtggccgtacagctaccatgatggctgcgatgcaggcatcaccccaaaccagagttcacttgatggtattaactggctgcccggtatgcggttgcctggatgtgcctgtcccggctctgatcacccgactcctggtgttgcacgcagtgctcctgaaattgatgtgattgaaggcagcactgctccgctgtatggtgacagcggtccgttcgtcggtagtgcatcgcagagtttgcagaccgcaccatttgacctgtggtatctgcctgactatggtgagttttttttttatcttctccctatggaagacatccattaaccaaaaaactcagacttcgccgctgtttatgactcacgcgtcacccaaattaactcctaccgcggcggtgtctaccaacaggccatgtccggcctcaccaacctgaatcaccgctggtacaacggcaccgaattccaaacctactccttcgagtacatacccggcgcagaaggagaggtgacttggttcgtcggcgccgagaaaacctggacattggacgctcgcgccatcggacccaacggcaatgtcgggcagcgcatgatcccactcgaacccatggcgctgatcatgaacatgggtatggcggataacttcgcgccgcagaacaagagcatcattgattttatgcccgccatcctgcgcttcgactacgtccggatctatcaggaccccgatgatgagagcgttacctgtgacccgccggggtatgagacgactaagtatattgagaaacatcgcaaggcatatgataatgcgaactttacgacttggtatgtttatcgctggtttttctcatttgcattttactaatgattgaactttagggacgaggctgggtacaattggcctaaaaattcatacatgcacgactgtccggctaattagattctatcatttgttgtctctttctatcctaaactgttagtcgttttagcggcattgtttgctggcgttattggggttgggcatcacattatattactttcgccattcatcatcaaccatttgattctcactctttcttcgtagagctcatctagtcttctctcacctcaactccaaccgtatgacgtaatgataaacttgatatctactaagcctagttagggggttcaacttcgcccattgtacaagctcaccgcctgctggatctggccacagtacggacacgccaagagggcacgatatctcaacacgttgaatcgttataacttgccttctatctgcagtgccgtgaatatgtatctttgaacttcattcttgaggtagaattgattcctgtcaaccaacccctcttccggaggtgaccagtctctgcccttacggccaatatctctttctcatccactgacactagctatagaaatccggggtcatacaataggatatacatgaaattatctgccattcatagatgtgaagcacattccacagaagaggccttttattactcctattttcaccagtcattggttgcaccccacacatcaacttaaaccccccctctcgatcacttgcccccgacttatatcccatatccacatcttcaccatgtccggcggacccataaatctcatctcagacacagaatctgaatcagactccgatggcggcatgcaactcgacgacctaaaccgcgccgacggcataccaatgcacaacaacggcgaaggtctcgaactcagaaacgtggacggcataccaatgtcccgccctggatcaagcgatgatgcttggaacgtgaatggaactacatctggatcggacacgggtatgtcttccaagttccaccatctcatctctatccatctccccgaaccaagtgaatcatagtccagtatacaaactaacaccgcgaaaaggaggattccgcgaccgcgccccgaaccccctcacggcatcatacaatcgccccggccaaggcggcacggagtctcaaaccgccttcgagaaagacgctcgcacacgcccgcatctccgcgacgagaaacacgccgcgctggccgtcctcatggacaatgagttgttgattacgtatgcgctttcctcgcgagaagtacgtttaccaccctgtcctgtccgatcccagccactatcactattacaagtacaagtaaattaaactaacaaaaccagacaatcccccaaacccgccgacgcttcctagcaagatatctcgcgcccaacgacccggacaaagcagaagaactgtacaacccgcgcttctacatcgcgcctgacgggaagggcggggagggatcgcttattcgcggtcggtaccgggagattattggggatattgatgatcataactggcataagccggggcatttgaggaccttggatgcgaaaaagacggatgctaagagtaagaagagcaagagtggttcgcggtctgtttcggtggggtctttttctggtgcgaattcaccgagggtttctgggggtggggatgaggagaatctatgagttatgaatatatgtttcttggtcttcaaggctacatagactacagactactaatgacagatgataatataatgttatattcgctaaaacacattagaataaactactatacagagaagcagatcaacgacagggccaccaacccagagaaagaagaagagaacaaaaataaagataaaaggggtatcatcgaggggatccaaaaagagaagacatatgtagcttctctgttctttttgtgttctctcctccttcgatctctgggatattacccgaagactcaggcaacgcggtagcactgcagtccgacttgcgaactcatctttgcattcttgatggaacagctgagctggtcacagatgccatccgagtcggagaaaaggaagatgagatataagggtaaccaatcagaagacagggtagatgccaaggcttacatctctttctcctctctcctccgttgctccgagtggaacagactctcgatgtctccaacctgcttacgctccgagacttctcggttgagcatgcgagaataatgggcctgggcattcatcagtgtcagtcctcgagacggtacgggatcgtattccgggtcattgtaaaaaggttgcaggcggtgcgaggtggtgatccggatccgaccgtctctcatgacaggtgattgtcattgcaaaggctctgagcttgaagagaggcggttgagatggaggtagacatcggtcccgtagctggagatcaattagcaagggatcggacagtttaagcagagaataacatacccctccatactgatcaacttcaaatcaccgccaaagtaccgagcgtatagtcggcttactggtaggccatatccaaatccagccatgggtgctttgaagtcgttcttgtcgaaatcagggtccaggttgggcgtttgctccactgtcgtgtacatgtaggtccatacgagggggatcgacgaccgggggataccaccgccctcatcggagatcttgatcgtaatgtcctctttgccttcggctactattaccttggtcacggggaattcatccttatcggccccatgtgcttcaacgaccgcccggagcgagttcttgagggtctcaaagagcatgtgcgataggtgtccgggaacatacatgaagttcaagtcctccttgcagaccagctgcaccttgggcgactcgaaaagaccgtagtaatcctcgcagacgaagcgggcgttttcaatggcctcgagcgcgatgtcgcgaacgttggtcttagtacaaattattccgacataattggggtgtttgacatgcgtttgttccgtgagtgcgatgtgttggccgataagcattcgtataccgatccttgacatgtaaaaccggtcgaggaaggactgaatcgtggagtcgatctgcatgcgctgacgcgcacgtttccattctaggataccttgcgcgacggtggtcacaaccccgtcgtggcgtcgtttgatctgttgaagggtcttggcgaatcgttggttgtagtcgttgagttccggaggccagtttccgcggtcgtcggaggggaagaagtaccgtcggcctgaggcggcgggtgacctagcaacaccatttccattggatgcagtaacggatgaccggtactgtccttcacgcacgctggggttttgggttgtttcagagaggatttttgacgggccgttcatccggccgggtcgcaacaggcgtgctttcacttcctgagtcagagtggggcggggaagagcaatgatttcctgatcgggtcagtatatggatccgggatcattattaattggtgagtcacatacctcgaatgattgcgcataccagtcctggacctttttgatcgagggcatctcgctaagtccatctggaagctcacccagatcttgcacgcgatgtgcgagacggatcgggagctcctcagacaggaattgagaggcgcggaatagggtacctggatgagagttagttatgtaactgtagatagcgcagacccgttcatagttcatacctgttgagggacggtccccaaactggaccatctgtctcagcgagacaccggttgcggggaagctggcataatgtctgatggtgtccatcagcctttccgagggcttccacatggtggtgatatattggccgaatggccttggaattgtgttttctagaaagtgatctatccagagagaagttgtcgaggaggaagtgtgagtgaatcgagtcatcggttttcactgccgaggttgaccggtccccgggttttctccgcctctccgcttgcgctctccggggaccggaggaagatcacacgacaggaataagcaacgtatgatttgtatcttaggaatgctggcggactgattttttgctgggttttctgtttttctacttcttttttatattaaaaactacattcacaaaggagaagtgttatattggagagactatgcgattctgaaagtccgttcacccgtggtctatgacataattgtgtggcctcaggcaggaatcacatgttagatatcagctgatctgatgttggggatgtcggggatgatatccataccactcatgtctttctttctagctattaacaaactaatggtaccttaaacacaatatgaatcacaatcattccaattatcaggtctgcattgattttattaatggcattcatggcttattgaagagaacgttcggtctaccagtatgtgcctgaagatagaatgagtcataaacatactaaagaggctcactaggtaaataccctggttgaaccaattgcgtatgatcctaagtgcccctttaaatacaataactttgtgtatcgcatctctctgccgtctccactcgacaaagagaatggtgcctggcacaagcccggttgtgtggctattccttccggcgttagtgatctgatccttcgtctgacaaactctgacgctacatctatgggagcagcgaatcgcgtcgagaatgaggttgctatgatgactctagccgctgctgcgctagacccaaatttcgagcccctcgttgtgcctcgcctgtatggctgggctggaaccacatctaaaaaaggggagccacagcaaggctggatcctacaggagctcatgccaggcgttcccctagacgaaaggctagataacatggaacttgaggagaagaaagaaatatttgcacagatcgcaaagctccttaaaggccttcaggacttcccgctacccgcctctattactaaatttggaggacttacatttgatcacgagaacaacataatcagtgcaccaatgaccaccaccagtactggtccctggccctcgtacgaggttgcatttgaagcacggcttaagcaagcgctgaagaaaaccgacgagaatccttatatccagggctggcatgagaatggcgtccccggttggaggcctttatagagcgagggctcccggaatctttcaagcaacttgaatcgcacaacgacaaggcaataatccacgcagtttttagtaagcatatttcccttgcacctcccgaaccctacccgcttgttcttatagatgttttctatcagcacccaacaatctgtgattcaacatttcctcaggtcgcatcacaggattaattgactacgacttttcgtgcgttctccatccttcatacgagttcctttgctcctttagtggggttgggggcaagtttgggggctggccttgaggcccgtgaagaaagggccctcaaggaagccaagttacacggcttcccagaccctcttcccgatgaccagcaaggtagcgagggattacagtggaaatttgccaaggtttgggaagacgcccttcagaacgagggttgcaagcgcccaataacaacctcagggattgacattgtcgccgatgtcgatgccctgcttagttctatcctgccctggcgcgtgacaaattcagacattctgaggaggcaaacttgtcaagtcattcaaaactgccgaaatgagaacgagaaagtcctgattgagattctggagcatatagggttctagaattattagcagaactctttcgggtccgatttaagccagcgattcacttcgagcctcgccaagctgttgatgtttcatttgaattctgatctatccagttggtatattcaatagcaaggcttatgatataattaaggaatagcatatgtacttagggtaccggacatcacctacagaagttactctataaccaatgaacacgtgactgtgactccgactttgggaagtatacgccgtaggaaacgaaggatatacaaggacactcgttcatgtgcttggtttagtttttcgtcaatcatacattgttacttgcgtttacctttttactgatgacttccttattacttaaacacggaggactcggttatatcatgcataatctcacgtacttttgtcaaccctgtcctctcgcccccttttagcccttccatggccatcgctaagaaaatgaccagccccgcggctatctcgcattggcgcaatcactggtcttctcgaagaacactccgttcatatcccatccttgatagagaagaaaagagagggaaaagtcatcggatgatgcaacgggccacgttcccaccgctacccattcgcccgtccaacagatccgctttctggacactcaagattctcttttcgagctcttgctgttgtcgagcgattattatctctgactggctattatttagcccctcctacccttttttgtgtgtgcgttggcgaaaaaaaaatcccaatatccccgaaaagaaaaaaaaaaaatacaatcaattctggccctaaaaaattatctcaaatctccaaaacctcaaaatcttcatctcctcaattccattgacaacccgtgcatcggtgcctcgaatgttgaaccctctcccggcctatacatagggaggaaaaccgtccctccgaaaagcgatagatatataccctccggaatccacaatccacacaaatgtctcgccgtcgaatatcgcacagcgaaatgaatgaggctctcgcctatcccttcatgcagtccaacggcccatacaacagtcagtcgaatggacaaccccgtcgaggccccatcgaaggtcccaatggccgtcgcctcatccgtcgcgtcacatggcgctcctccacatacaagctcatggccaccctgtgggtgctggccgtcctctacatcgtctggctagtccgcgacctcttcttaccgtccaccccgtccgaatccagaccaacccctcctgctcaacccgaacaaaattaaaggcgctgtgtgtgggcccccctgggagggggcgagaattgcgtcttggattgggtcgtttctgctgccggagtggggggggttgttttgggggcccattgcgggcttttgagcgacatgtcgggctttctttttggcattcccgtatattattcgggtcccgaggagttagacttggagagctcttgggcagggatgcattgcgcttgagggatcatgctttttttttttgttttggttccgggagagatggcgctgaagatacgtccacattgctggcttgtgtggtatccggagattctccgggctaaacctactggtaatggcgctgttggggtagttccggatggagccctggagtgttctgcttgtcatatgcgggagtcgactagtagctctctccttttggacttctaccgactatatctgcggtccggcgctcaattgacccaaacagctttcttttttcttttcgtttgcatgtcagcgttctattgcatatgggtatgattaccatacaggccgatagcctgatcgagcatttccgtcttctttcttattctcttattcatgggcggttcaattgtcttttttttttccccatacagcaaaagcgttgatcattttctcattctagaatgtctgttacatcctcttcccgctctgacgtccatgacactccccaaattgacccctcccctatctcaacccctcgaagatttggagcgcggggcatcggggaagcagggaagtggggggggaaatttccctctgagagatatccacaagtggaacataatgccttgcattcaatttgtatacacagtgactcccttctctttcacctataggaaatcccatatctcccatcgtctttttatatataacttttcactttctaacagatacacagaatacgactgtactaagggtaccttaaacgaacagggaagaggtctcgcccttggcaatgatgctcgcgtagggcttgatggccgcagccacctcggtgctggtgaacttctcgacctgctgaggtgcgcggccgacgaaggtggtggcgtcgagaagggtgtccagctccgggatgatgggggtgaagaacgcgttgcggcggatgcgctcgatgaggtcgttgtccttgccctgcttcttgacgttgtcggcagcttcgcgggagagaacacctgcgtacgttagaattccggtttggagaggaagatacggagagaaacttacggatctcctcgtgcgcgtcctggcgggagagacccttggcgacacaggccatgatgatgttctcgctgagatatgtgttagcaacatccattggattcgttaaagatgtactcacgttgccataaaggggagctcatcgttgacgtggcgcttgatgacctcggggtagacgacgaagccggaggaaacgttgtctaatagtggtcagccataatccgagcttctaacaactccgaaactcactcaggaggatgagacaggcgtcagcagtcaggtacagctccgggagactgatacggcggatagcactgtcatcctagtacaaagttaataaatgattctagacacatccgcggtatactcacaagagatcgctcaaaccactgagcggagtaggtgtccaagcagtccttgggaaggttctgcaggtgacgtccgagcgagcacagacgctccgagcgcatggggttgcgcttgtaggcctacaaataatcagctaaaggacccaacacaacagacaaacaaactcaccatggcactgctgccgatctggtccttctcgaaaggctcctcaacctccttgagcatggcaaggtgacggatgtcaatgccaatgcgctcacaggtggaaccgaaagaaccaagagcgttggcgacatcaacatcgatcttacgcgagtatgtctggctggagatgatgaaagcggagctgaagccagccttctcggtaacaagctcgtccaggctctcaaccttggcgtggtcaccgtggaagatctgcaggaaagacgcctgagtaccggtggtacccttgacaccacggaagcgcaggtcattgcgggcacgctcaaggttgcgcagatccatcagcagatcctggatccagagacaagcacgcttgccaacggtcaccagttgggcgggctgaccgtgagtgaagcccagacaagggaggtccttgtactgctgagcgaactgggacagcttgtcgacgacaacagccagcttggggatgaggatgtcgagaccgtcgcggagcaggatcagatcggcgttgtcggtacagtagcacgaggtagcaccccagtgaatgataccagcggcggcgggggcaaccaggccaaaggcatggacgtgggccatgacatcgtgtctccggcgcttctcctcctcggcggcaacggcgaactcgtcatcctggataacctcgtgggccttcatctgctcgatagcctcggtggtgataggaagtccaagctctgtagccaaaattcagtcaattgatgtgtttcatcaactacctctgatcttcgacactcccgtaccttgttgggcctctgcgagccaggtccaaagctgtctccacgtggagaagcgcttccggggggagaagaggtacttcatctcattgcctaatcaattgagtatggttaatcccgatttgtacaatttccggggttgcccctcctatagaggggcagttgggaccgacttactcgcataacgcgagttgaggggggtctggtagacatcgttgcttccggacattgtgtcggtggttgtttgagatactcaaacgaagaattgagcaacgagacggacgataagacagggacaaggcgatgtgcgggcaaggaattttgcttgcggcccggttttagcggggcttatcagtcacgttatcgtatgatctacatgtcacatgatatcatacgttctatgggatgttttgttgatctaccagtagggaaagcaggcttggtggtgcatacattattatgatattagctcgtatagatggagtcctttgtgtgatttcactctccgctccagataatcaagccaactgcgccagctgtaccgataggcttgccttgtcgtacttgatgtatttaccgcggcctttgtcgatctcaacatatcgatcgtaaaagcgcgcatacaagggctcgagaacagtttgcagctcacgagttagtaaagagcgcacctcacgctccatgtgaagggttttgtgccgagacaccatatcctcgaagctcgcgttgaatgctttgaacttgtccttgatcgcatccttatccttggatgacagggacttgacgatggcgcttgaatccacgttgccgctagaattgcgctgcgccccgcgggaggtatactgcacatcaagaaggtactgggatgtttccttccatgcatccagataggtagacgtcgcgcgcttgcggaaagtgtcgatccgggcaatactgtcggggttacccaaataacgtgccagttctgggctctgtcggatcgaccggtcgaccacgcagaacacgttggacaagaacacaccaagcgctgccttcgatcgatggaaagcccgacctcgaccttccagggaggtcatcaaggcctcgatcatatctagaatgaaatgcgacagaagtgtgctgctgtctggacctacatctagaggagccgagccagcggtgttggacttggcacgccagtttccatctcccagagacgtcaagatagaagccaaagggcccgagtaccccgtcagtgtggccaatgagctcatcacttcttccacaagaggcaccgatccaccgtccggagggagcgtggtattagcagccttgcgcttcgtttcctcgagcaattcggaaagagacgacttggcagtctcgcgtacaggtcgaagagcctcgatcaagaggctcttcagttccgcggccttggagtcaatccgataggacatcgcggtcacaatttcgatgatctcaaaagccaagaagcagtctgtcatcagattggtcttgatatactgattgagctcacgaagtgttttagagtattcgcccatagccgggaagaacgtagcctgcaacgctaggccctgctgatctccagtaaacatctccacaataataccgtgctcggtagttataaaggcctccagcgcattcgagtaaataccaataccattggtaccctgcttgtatgggccatcggtgggtcgccgtttgacggtattgagggatgcaatggcaagattctccaagctggatgcaatgtatggtccccgtacttccgcataagccttcagcgcggggttgtcccccttcccgcgctgagatccatgaacggatgccgagccgactgccgaacacaagggcgccatgtgggtgacggtatcttcgggtatggatgggaaggggagatctagaaccgtcgcacattagatctgatttaggtttcgtttggtcgtgatacgcgtacctttggtcaaatagtgtaggggctcgaccggagtggaatgctggctcagttccccccgtagcacttcttggagtttggtgcttccggtgtttagaagagagttgaagtcggcgatcgcattctggtttgatcgcaagtttgttgtgttaaggtcgaccagcgccttttcaacacgtttcatcgcccctaggtagtgggtgaggccggagctctgtggtctgggagacgatcagcaaaagactcagactatatgctcaaagagattagaagacacataccctgcgcgaatgattccatcttctcggttctttgcatcgagaggctggcgcaggcgatcgatggcgtcgttgaccttgtcgatattactgttggtgatttgaagggattgggtgttgctatagatgggaccaatggcttctttgacaacttttcctcctgtctccaggcgtaccatggagccttgtatcttcttcgtgagtcggttgagcttctcgaggttggcatataggacctcgacctccgcgctctcctccgcgtaggcggtattccttggcgccaccatggttaattggaaaattaggcaaaatcaatccagagagaccatatcacatgtcaccaggacccctcatgtccttcgcgggcaaacggaattgatcgatcaaatggactgattgtccctccagctccatccagtccagtgataaggagctccgccacgctagtccaaaagaagtcaggcccagtccggccttgtcacgtgaatccacgacgtcatcaacccagggcttgttcacaggtagcttgcaagaaaaggcaggcggggcttttgcagtccttcaatggaccccctggatgcagcaggtctcgtactttgccctaaccttcccgttcacaatgggcactgcaaggaccactcgtctgtggacggtgccccctgctgccctagctgcatacactgcgggggaatggtctcaacccagacaatcaagagctcaatatactacttctcgaacacgatacagcaatgattcagagtctggaaagtccaatgcaggcaaagacgatggatccatctggaacaacatcagccagaagctagatgaggttaagcaaaccgttggccccgccgagtgggcggatgtggggaacatcacagactatatcatcccagattggacgcgatttctaccagctactgccaaaaagctccagcgggagctctccctatctcccggctcattggcagacgatatttggagggaggcacaggaccctgatatcaaccctgagattctccgcgacgccaaggtacgagtaagtgaggatctttgcaacgaagagcaggcatttagacggcaacgacaacggaaggttgtcaaagcattgtcatcttacctcaaaatacccgtggaggacatccaccccgaagacgtaccggtcattgcggtgtgtggctcgggaggtggtctgcgcgctctagttgcaggcaccggatcgtatctggcagcacaggaagcaggtctgtgggactgcatcacctacacggctggtgtcagtggcagctgctggctgcaaaccctctatcattcgtccattgcgcagcaagacttcgacaagcttgtcgaccatttgaagaatcgtcttggtgttcacattgcattcccgccggcagctctcaatctcctcactactgcgccgacaaacaagtaccttctcagtgggtttgtggaaaagctgaaaggcgatcctggtgcggactttggactggtagatatttacggattgctgcttgcagcgagactattggtcccgcgaggagaactgggagtctccggttttgatttcaagttgtcgaaccaacgagccaatttgataaatggggctcatccgcttccaatttacacggcggtgagacatgagattcccgtcgaagccctcatacaaaaagatcagaccaagaagaatccaacgcctgaacagttggcgaaagagtcgcgacatgaagcatggttccagtggtttgagttcactccctacgaattcttttgtgaagaactgaatgccggaatccccacctggtctttggggcgtcacttcaacgcaggccgctctgatgtttccgctgacaatctccccatcccggagttaaggattcccgggctcatgggtgtttggggtagcgctttctgtgcgactttgtctcactattacaaggagatccggcctctggtcagcggcctggctggatttagtggaattgattctctcatccaaggcaagaaccaagacttgatcaaggtgcatcccatagaccctgcggctatacccaactatgttatgggcatgaaagatcagctgcccgactcctgtccggagtcaatcttccgagacgagcacctgcgtctcatggatgcgggaatgagtaataacctgccaatctacccactcatccgacctgggcgcgatgtcgatgtaattgtcgcatttgatgcgtctgcggatgtcaaacaggagaactggctctctgtggtcgatggatacgccaaacaacgtggtataaaaggttggcctgtcggcgccggatggcccaaacattcgagcctcaaggataccgagaaagcactgcgcgagccaaataacatcaccgaggggcaattgacagataaactcgccgacgctatggatacctctgaacccccacccgatgatcaagagcccaaggccggcacagacctgggctattgcaacgtttgggtcggcaccacagccgagcgaacctcgaacgacgagcctccgccatccaaacgcctatttgattcttcctacaacgaaaccccctccgaatccgagttccacctgatgcgcccagatgccggcatcgcggttgtctacttccctctgattcccaatccttccgcaccggatattcctcccaaacctaaaactcgtccgcgcgcagctgctcagtccatgcgacaggatagctctcaaaccagagatccggaactgcctcttgctccacagcccaactcgatcgacccggaagttgatgatttcctgtctacttggaacttcatctatacgcctgagcagattgattctgtcgttggccttgcaaaggcaaacttcttggagggtgaagagcagactcgtcgtgttatccatgctgtctatgagcgcaagaaatccgatcgcctgcggaaggaggcggcagagcatcggaagaagatggaaggctttgtgcctctatgattctcccgtcaacttccaccggacaaaacacgactttggtcgaagctgcatttaatactacattgttgtaaatatagacgacactttttgacatttttacctcgcatacccatggcctttcctttcattttcattttcagttggtttgagttagatagagcttgacctagacctttcatttatgtatatagtacagagcaaacgacctgtgacaatgatgaagcatagaagagatccaatggtacattcataaatgcactatgcactatgtattacttatgcacttgtacaagttctagctaataatttcagagctctgatcggttttatcctgttgcagcaccattcttctcaaaattcgtcttcactccctcaagctcttcactatgcacgctcttgattttggccttccggccctcatcagtagtcatctcatcgtcactcccagcaagactaacatcctgactgtcacccgtctgcttccgcagtccaagttccttctctagcgtatgtcccagcttcttagtcttgtccgagatacttgtagcagtacttttctgcgacgaagtctcagaaggaggctggttctccttcttatccccgtgcggcattccgcgccagtcagccggctcgcgttcatggatggaatcaccaggtttgggctcgctgatcgctaccggcgcgctatcttcggtctttttccctttcccttcgctcttgatagctgcgctggcttccaccgtctccgtcgcgggataccgccatacaactttcagcttgtctaacgcccggatccccttcctcgcactccccttgatcccatccatcgcctcccattctgtctcgaagacgcccgagtcgtgttcggcgccgccttcgaaatatgggttgaaccatacgtgtgcgatggaggttaccatagcgaagccggtataggatgctttgctgcgacgctcgaagtcgatattcacatccgagctagggacaatgagtggcttgtggggtttgtagagaattgctgagatactgtggtcctgcgacgataagccggagatatcagatcccgataccgtcggggacgaagtcgcaggcgagggaattggattcttgatcctggagtccgagttaggatctggcttggtagcctcttgttcctcagacgtcgagcccccgtcttcaacgacggtacgctcgttccgatggaacagatgaaaacacttaatcttcttccccccgtccacatagccctccacggcaaccttaaccccatctttcaagccccatatatgcacctccaggatctccaccggccgctcgacatactgcttccccagctcattcgcccacttatcgacatacccgacataccgcagctggctggggatgctaacgccgctcccgaaaccgacccgcatgcgtcgatccgtaaaccgctgcagcgcgtcttccttcttccacccttcctgactaatcagatatgcacacgcgatcgtcccgctacgccctttgcctgctttgcagtgcacgacggcgacccgttcgtttttgtctgtgtctggcgactccttgccctcgtctagccgctgtagccagttccgcatgcttcccattatgacggggacatacgcgaatggcggtgggtggtggtctggccaggggaagtggtggattcgtccgtagacttctgagtcggggtatcctgtaccttcggcgcggaactcccagatacaccattctttgccatgtttcgtgtcaaggaagttgactagtgcgtctagtgggttgcggtaggcgcgctttgggtatgttgatgatggaccggaggttgcgatgactgtggagtatgttaatgggtgtgtgtattttggtgtgggatcgataaggatgctaccattgtctgtcacgtaacagagatctagccctgcttctgggtggtgttgtcttggacctgcaactatctggcggagaattgatgactggcacattccaaggttagcagtgggacggttactgagctcgagctggcataccattgacagagtgtataggtgtttataatttgtatattccaccagaaatatgtggtagaaaagataatatccaaatcaaaacaagcacggggagttctgttattttcgcggatgatgtcatccggtgaattaagccctcttggctacaggtaatctactaactatattcgaccccggacctttatacaacaaatactactgtaacaactatattgcagcaagaaatttaattcctttgtacaccgtagagtcatagactaaatacacaaaatatttccatcagaaaatccagaaatttctaattgagccacatgtcgcgtgcccatccaagaccaattgagaccatccatccattacattagaaaaaaacagccaaatccacgcaataaaaagcatcacaggtccagactagtagcaacttatgcaatgccatactcctgagtaggcttcataacaaactgaatcgggttgtggtcagggacggtaacattcttcgcgccgtgctggtaccaagtcgcgagggtattgtcactgagctgggatttccaggtgtgagtgacatcgacattccagaccgggttttcagcaggagaaacaatggtcgtgatgttcttgtcgtcgcagaggacccgctcgtctgtgacgccgctgcagttggtgcggaacttgggggtcattgtgttctcgcggccgacaatgtcgtatctgtagacacagccgcctggggagcagcctatggtgaagttggatacgccccagatgatgtcgtcggtgatggtcttagtctgtaggctggcggggcgtgcactggctaggccggcgagcacgattgggaggatggtggtaagttgcattttagattatgaaattgaattgtttttggtagagaagagtaggataaataaataaacaattgagtggtaattgggtggttgaatagatgaaataataaggaggaggtgggaattatatacttaagaggcggcaggcgtttacccttccctgacggccgcccttggcactcggaaactcacgccgatcactttcaggggaatgtggtgaatgacctcccaatattcgatacaagagaactcgcttggtttctagaaagccttcgagccatcgaatcaatcgcttgacgttcataaagggtttattgtccgacaagttaccccatgatcgtcatcgaagtctttcagcctgactatttatagtacatggatccacagggaacagggttcatatcaaggcgccaggtgtttgcttcttgtgaagatgatttgagaacagaacagggcagtaaaattggctatgatgctggggcaaagttgtgggtaatacaagtgcgaagagaggatatatacatactgaccgaagtcaaaaattgtgtgacatgcccaagggataattggtggtcttgaggaattgtgtggcgtgtattagctgcagattcgaggcaacatgccgtcaaggaaatgattattctgatcgattgccctcgagggacaaaggattccaccagttgcacagttgcatgtttcactagggcttggcagagccattgtcggtgccactggcttcccactcatcccagccctcctctctcatgttttgctcaatggctagacgacggcgtttcttctttcgacgctctttgttataatcacgtcgctgctcgtccgacatgctcagccgacgaaccgctggcggtacagggtgccaaccggctttctcgttcgcttctttttccctctgtttctgctgtagctcctcatctagcttcttcacatcgtcccgaatgagagggtgatattgcagtcgcatcgcaaactcgtccacagaccccgcacagatctcacgggtttccgcctgcgtttcagggctgagactggcgtcccgcttgatcaggtcctggaagtacataaaaccggaccggaaattccctgcatccaaacacatcaggatgatagactcgaatgtaacaccgttcggtaccactccaagtgatgccatctctttcaccaggaacatgcccgattcgcggttgcgggccgttcggcacatccgaattagcgcgttgtaaactcggacgtcggcgccttccgggcataatgtataaagctctttgtagaacccaacaccgtcgtccaccacagatggatcatcatgggcatcatgttcacagagatccgcgatgacacgtacagagccgatgggaatggttcgtttcgcattcttcaaccgcttgagaatctgccacgcctcccgacgatcaactttactctgtatcatatgcgcaagaacacgctccgtcgagctatctgttaggggaatatgagcttcgtgcatggtgcaaagcgcttcgaacgcagcaggcagattgcccgctgtcacgtgcgtctcgacaagtctttcatactgtgtgcgctcgagcgggatcccactctcaccgaggtaacggaacacagagctcgccatctccgtatcaccagcatttgcagccattttcaatacgtcatcgcagacttcaatgagcggatgcatgtagcccagctctaccatccgtcgccacacgtagtgtgccatggggtaatggccgtgcttccctgcctcggtcaacacgtgcatccaaagccgatgggtcatgtcgtggccctggtcgacgcgcgcacgcatcacatcgtacacttcatccagctctccgtggtcgcaaagcgtgtagacaattatactgtgtagccagttttccacaaatatatccttgcgctgcatcaatgcaacgtgctcgagcgcgagctcgatctggttctcgcggagaagaccagccgccacaaaatgccatccggctgggctcagcgtgagccatcggtcgcggagcttgttgaggatttcttgtcgtaggaggtagtccggatgtacagctaggacctgtattggaattgcatcgttagtttcgctgcatatgtagctcgcttcaaccagataacctacctgcaatgcaccgtggagtgtcccagagtctgcggtgatgccattattctccatttcctccagcagacctcgcacaagctccggcgagcccctctcattatcggtatttgcaagaatcagcgccttgtagtggcgagcattcggcttgacatggcggtcccgaatgagaagtcgtaggatctgcgttatgtgtcgaatgttcggcttgttgtccattgcatattgtaatcgcgactcgagcccttcgttcgttttacctagaaggtcgtcttgcaccttatgtgttcgtgtgtatagcgggctctttcgtcgtggatgtggcctggcgtatgttggatctggagataggcgagtgtcacggaattcattctcacgtggctcccgtgtttcgctccaatcattatgatgtgctgcattatatgagaatttggaatcatcgccgcctgaggtgttgtagcatcggcgcgaacctgagctcgggctaggaatcgaaggtagtgggtatagcgggtttcgacccttggatttggggaatgccgttgaacgactgagactcagagctgtaaatgacggacaaagcgagtaccacagcccatcgaggaccaacgcccgccgcgacatatccgcttgtggctaactgatcggaagcttagcctccgcggatttgatctggagtttgatatcacgtgacatcctcgaatattcgcttcttggattgcgcgggatttacaatgaaataggtaagtcaggtttgggtttttggaacataaaatttagaggtagttgtaaatcgaccaagtgacccagatgccgtgaaaatacagagccagatacgccacggccatgctcgatcaaaccgttccaccacacctttcgagcgacctcaccaccgtctcctccgggggtatctcgtttgccgtcttcttaaaatcattgatgcagaacacacttatgtctaattggggccgcctcgtccccgaccacgtccaccgcggccgccaccaccaccccgaccacggccgcggccacgatcaccatctcgcccgtgaccgccgcgacggccttgtggttggttctgttgctgctctttaacaatttcgacaatctcttcgggaactcgtaggtatttgatctggtggattgttagcgtatagcctaaggagcggggctctgcgttgattgcgtgtcggagggcttacgttgttgccccggatgtagacttcgggtaatctgaagaagcggtcgccctcaggactcgtctgcactacctcgcgcagaatcaggttcatgaagttgtcgcacgtaaccaggtggccgttcagagtttcgccgttcttgagctccacgagcatagggtggccctgtgcggccgtgaggagaccgagaggcagctgatcataaactgacttagtataggtgtcggaaaaggcgtttgggtaaagctggagcttaccattttgaaatacgatcgaggtgggtgaaggtgggagagttagttggcgcacagagttgaaagagcgcgggttgttgcgtgtgtccaaagtttgtagcttatggattgaacggaggaattagacccggcactgttgatttatctggtgatgttgacagtagcaatggattcaagctctaagagatgcgatgaggaagccggaaaaagggaagtgccgagcccaaatgtggcttgggtgccatctactacgaggaaccttcgaattctttatattcttctatttacgtccattatataccaaaagcatagatctacagtttgacaactttcggtaacataaattagggggtatcgactagaattgagcttttgaggttgcacacctattggagagaagattaatccgttgacttcgaaaacatcctcgtgtgcattacatagtgcataagagaactgagcaccgcaaggcttaaacctttggtcgcttagctagctgtgtcccgtcctcctcctcgtcgtcatcatcatccataactgtgagcttgcgcttgacacgccggtctcggctaccggtaggagccttgctaacttgtttgtttgcctcttcctcttcatcctcaccttctggcaagcggccctcgagcgcatccaatgtgatctcgtaaccctcctccacattttggaccgtagcatcaagtttctccactcggtctagaagctccagttcgttcaaaagttctttgttctttttatagagacgttgcttggttagcatacgccaccaatagtagcgtcggtcatcctcattttcggccttgtacttcttgattaacagtcgggcaaggttagtgccaccggccaggcggtggctttgaggaatctgaccgagaagatacatctctagaacgtgtgcgaactgcgtaggttcgatcttgaacgatctgcggatgtcatgtagaagcttggtagggatgagggcggaagtaggcacattgcgagggcgtttcttttgagaatacgccccaaggggatcggggttgagattcacgttgtgcctcaggaactccggccgcagcagacaataatcggctgtatcccggagagcgtcgaactgttcattggggtcttcgatggtcaattctagaatggtcggatctgcgatgcaggccgcgtggattgtggtatataggtgtgtgccgtggccggcgcggtggtgtggagggagaataaggaactgggcaatgcggagtcgtgcaggaagcttggcgatattgacttctggtaacgggaacacttcgttcttgaccgcgggcgtttgtgattgatctcgctggtaataccaatagcggtacgttgtggcatatccgacaatcgaatacgatgatgctgttgctgttggaggagtcactttctcatatctgtaaatcggattagcctcaggtcacagatatcagcacaagacaaacatacacgaaatataccctccaccggtcgagcgtccactcggggtcgtctgtctctaagggagttccagcttcgatgaagagggagacgagaacctgcatgcgatccagaattttccgcacttcagggtctgcaagtgatccagcccagacctcatattttcggtcctcaacctcgtagctaatgacaaactcgcccggaggcttgaagtctttcgcatcagggtcgttttgaacagctttctcatagtcttggagatcggcgaacgcctctgcgcaaaatgtggttagcttatatcgcgcccgctgtcgcacaggccaaactcaccttcttgaacaaagggtttcaaagtatcgagaagatcaacagcagctgtgtcaccgacggacttgaacttctcgtcgtaagaaatatgaacatgagggcgcaaatcatgggcggcgaagcgcaagcggataatcaagcccctgtagccgaatatttgctcatcgtcgccaaagataggataggtaaattgggggtggaaggttgaaagtgttttcggcttcttctcgccgggttgaatgatcgtgacgtgaaccgcatcgttggcgtcgcaagaccctaaagtgaatcctaatcagcttatatcttggcagcattagatagcgggagactatgaactcacatccagcttcgctcgccattttgacaggatatgtggagtttgaatgtcaaaagagacgatgaaggatctgaggtctaaagagagacgcgaataacgcgccccggcccaggcgcgcatcagtattacctaatctggatctatggcccgcctagctctagacggtaataaaccttgaccagtcactactattccgtacgccgtaataaggattgaatatctcattaacagactgtctaaggaaaaggctctatggctccagctttacgcacaaattttggaagcctctgattccggactattcacaagtataagactcggacaagacaagtgagaaaatatatcagggaggtcaataccactatttacaattcaggaagctgcgagtactcggatagtaacagaaaagaaccttccaaggaaggggctaagttggaacactatccagcttcattctcggtgatgatatagacgctagttgccaccactagacatcggcaaagcccacccggcccatagcccagcccagccccacccccccaaaggccgggggtttgggtgaactnnnnnnnnnnnnnnnnnnnnnnnnnnnnnnnnnnnnnnnnnnnnnnnnnnnnnnnnnnnnnnnnnnnnnnnnnnnnnnnnnnnnnnnnnnnnnnnnnnnnnnnnnnnnnnnnnnnnnnnnnnnnnnnnnnnnnnnnnnnnnnnnnnnnnnnnnnnnnnnnnnnnnnnnnnnnnnnnnnnnnnnnnnnnnnnnnnnnnnnnnnnnnnnnnnnnnnnnnnnnnnnnnnnnnnnnnnnnnnnnnnnnnnnnnnnnnnnnnnnnnnnnnnnnnnnnnnnnnnnnnnnnnnnnnnnnnnnnnnnnnnnnnnnnnnnnnnnnnnnnnnnnnnnnnnnnnnnnnnnnnnnnnnnnnnnnnnnnnnnnnnnnnnnnnnnnnnnnnnnnnnnnnnnnnnnnnnnnnnnnnnnnnnnnnnnnnnnnnnnnnnnnnnnnnnnnnnnnnnnnnnnnnnnnnnnnnnnnnnnnnnnnnnnnnnnnnnnnnnnnnnnnnnnnnnnnnnnnnnnnnnnnnnnnnnnnnnnnnnnnnnnnnnnnnnnnnnnnnnnnnnnnnnnnnnnnnnnnnnnnnnnnnnnnnnnnnnnnnnnnnnnnnnnnnnnnnnnnnnnnnnnnnnnnnnnnnnnnnnnnnnnnnnnnnnnnnnnnnnnnnnnnnnnnnnnnnnnnnnnnnnnnnnnnnnnnnnnnnnnnnnnnnnnnnnnnnnnnnnnnnnnnnnnnnnnnnnnnnnnnnnnnnnnnnnnnnnnnnnnnnnnnnnnnnnnnnnnnnnnnnnnnnnttgtacagagatcagacgaattggtaaggtgatctgggaatagcttcatttttaatatttatggatagatcattttttttagtatttgtgcgtagattagataaactagtcaggtgatctaggaatagcatcatttttggcatttatagatagatagattagatgaattggtaaggtaatcatgttttttaccagactaaaacaagtgataaaaacctataatttattaatcttatataatctgacttataagcgccaagacctatataaaatacaaaaatgggctaaaataggcccattatgggtttatgggcttagcccactgggctatgggctgggctgggcctaggggagctgggcccatagcccatgtgggttgggctatgggctgaaatcttgggcccatgctgggctttgccgatgtctagccaccactacacctaatagacccgaaggttcaatagttattgtctagcatctatatcttgctgtaccttatctagcttgccaaaacattcccgaacacatcttggcgacgaatattaaagatgatatctagagtgaagttcgcaggctgtctttcttttaactttcattcctatcatgtattctattccatcgcttctgatctagtttccatttcccagctgatttcttcagttggggtatcatttccaaagctcgccggatccccgtcgtacgtcctattcgctccagcgcttcaacaacccaatcatgaacttcgtcaggaatccccgctgcgctcccggcaattcctagtggaaaaagtagcatgaatgtaccatttaacagtggtatatctgacgggtcttcattgactccttgctcgaagatagcttcctgacttgcagttccggcgcatatgtcacctgccatgcaagaaatcgtgtccaatgcttgccgccgttgaattacatcgtctgcggtgggtcgtgccattttcgaaatttgggatacgatggtctcgttgaccagtaatcgtgcccagcggtagtggttgaaaactctcgcaacccacatgttcgcgtagacatgatactggccacgaaaggtgtgctcgtatgtgttgggttcttttatagcgaaggaccagtggatcgggaggtgagtttcccactcgcggagttcatcttcaaataatagggctgagttcactactgctctggaaccgggcttttggtgatgcacatgtgcatcgaacttcgtatatcttatcagtatgtcaactaggtcgacatctggtaagatatccggtggcgcagatggtatgagatcaggagaccaattcagtagatctggggtgacaaccctcttggagaaatacttgacaattgagacaaagtagaattgtaagtgagctcgatggttcaagttggtaagtgatgaccgaaagatggattgtttaagtaacgcggccgcaccattcatatgcactatccaagagttgagctggtttggggtacagctgaccatctgcgcgggtcagtttgaattataaaaaagcaattagaaacgaaatgcatacctcgtacagactcagcattacgatcaagtggagtgttctgtcgggattggcctgagtggggttctccactacttctcgtacagccttgatgaccgtaacatgtttctctcgagataatatccgcagttctctgtcattattgacattggacaaggcagcaaggccgaccgagacgatagcatctcgactcgactgatcgagagtaatggccccaacttcaggagatggcttcacagtacctatctgtaaagagccatcttctttggtgacaattcttgtcacaaaacggttaataaagaacctcagcccctgatcctccaatgggatggacagcggggcagcaattctcggagtccgaatcaattggctcctgctcctgcagactaatgcatctgacggagaacagtcgggtcgcgagccgggggtgggtatatcatattctagggcactatcctccaatcttcgacgggcctcggtcttagcttttgcctctgcacttcgtcgagcggccttgtcattctcatcccggaacattgaagacggcacatcccgatagccgccacatggcttgcctgctctcctgcattgggaacacaggggctcaagccggtcacactagaccatgtcagtctacaattgggctggtgttaggccacgccacttgcctttatccgtctttcccgacaactgccgcaacatttactgggacgaccatagaacggcattgtctcttagtggatgcgggtggtcgtattcaattctaaataggcaaagaattcgtgagatcagcccgtgaacatgagtcgatgaccggggggcttggaggcttggactccactatttagtgggttcttggcatcgatcggcctttcctaattgggtatctgtttcatcctagtcaaacatatgtacagtctacaacaaagtatgtacacatcagatcttagttattgaatgtctttgattgtggctttatcattccatatttgcaattatatttgggcactcggctgttgcgcgagacagtctcgagacgatccctagatttagttcgacaaacattcgataaacataagaaaactagtatgaggggttcactagctaaaccaagaaatatacatggtaaaagtattcgaacagggtcagcggtcgaagaagcccttctagggcatctaaacgtagacctattgtacatggtaaacatgtgcctgacccttcacgtggtaatgatgtggctgatgatggtgatgagctttctgcgagctctcaagtggggcagtgggcaaatctgtcgatgtgctggctggaattgtactgcccacaaaagatggggaagtcctactgttggctgcaatagttgatgatgtagctgtttcggtgtccaaaacagcagagactgcaatagttgatgatgatgcaactgtttcgatgtccacggcagcagagacagcagcaaactccgtggtggttgagtatgaaacaatcgaactttgggtggatacgccagaagtcgtagtcgttgcgctaggagccaagctcaatgtagcggacgacgcacttggtgtgggattggccgtagataaaacagctttggaggaggatgcagatacaacatcagactcatccatgtgatagagcaatgatccccagcccaacccgtcgtaatgaccagacccttctccccaggatcccgcaccaccctccgcaccgccgtaatattcaagagagttgttgaggtaaagagtggtccaaggtgcgtccaattgcttcagcacgacatagtggttgtagagaagctcccaggtaggtctgatggctccacgggaggcattactgatctcggtgtagctgactataccgttcgtgtaggggacgaagggaacgtcgtttccaaggttgtatcgcgcaaagtactccgttctagggcgaatattagtaattgctaaggcggaaaccttgggatgattggatggtacttacccacggagaatccggctatcgttataggcaaacaaatcctctccttggttcaaggcctgctgcccgataacacctagaagctgtatgtctaacgctgagtggccctgatcacgaccggattcttggccttggccgagtaaagttccagtactaggttcttcaacgatattggtgatagcattgttgatggcacccgttccatccccgttcttgaagtaattcacagcgaaatcccatactgtttgattgtcggttatgacagccatagccatcgccgaagcgacattgcacaactcccagttggcgaagaaatgaagaatattatgctccgacgactcttcatggttcagccaggtgtagtgcatcgggataaagatgttattggccatttccacgacagatgggaggacatcatccacgaagggctgatagtcaagaaggagttcggctgcgttggcgagttcatacccctgcaggccagctgtgaggtacttgtcgtcgccaccaccgattgcagtgagattggtcgcccatgcatgcaggatattgctagcggcatcggcaaagctcgtgttcccggatatcttccagcgtaagcctagattgaaagctgccgcgacgtcatgccagaggagctgtgcgtttgcggcattgtcttcccaggcactccgatagacaacgctgactgctgaaggagtgtagctggcgtccgacaatgagaggcttgtcaaggtattccaagatgtagtccatggatccagactggcattgatctttttctgggtgcgagagatatcgctttcagagacgaggaggccagggtgcacaaaacttgctacaagggggagaaaagggataacgaaagaaagagaggggaccattgcaaagagaaaggcagcaatgagtacaaatatggcaagaaaaagaatgaaggacaaaactaaagatatgaggaaccagcctagtaatatagagatcgttattctctggttagattaaactacaaataaagcagagatatattcgaggtctatgaaattactccgttcttaatttaaaacagcctgtgtttcagctatgcgctaggaaaattggaattccggacagtttcatgtttctaggtgtttgtagacattagctccggtacctgtcgatcaagtactccgtagttgtcctgacatcggaaatgaggttatattcggctaggaaattcgtgggatctattcgacaagaaacagccaagatattctcatagtacctgaatttattatggcatgcgtactcggtctatgcttccctccttaacgatgtagcacttcaataatgtcttcacgatggtatacggggtaccatatggtagataactccgatgtcttttttggatggtcttcctagatatctctttagacgtctttttacacttgtttgcttctcttcttggtattatagctagaagaatggtcattgactatatcactctacaataggggtaaacgcataaaccctgtgtataaccagagatcttttctacaactcaacggaaattgttccagaacagcttccagtggtatcgtttggggttatcctgtttcttctaagagacatcatccatatgggacccgtgttccccgagagaaaaagcaggtggaagttcatgagttaggcccaagagctgcgtttctgatatgccaggctaagctgctgaggtcggctacatgccatgttacttcgcagagactagctctactaaaagtcaatttcgtatacaacagcacaccgatatctggccgaggtaccgtttccattgcatcaacagctattttcatgaagtatattgccaaaaaaagatattgaattacgaacgtgtccggttatatgacttttcgaggtcttaagacatctccctagagagttgagagtgaaaaaagaggaatagtgaaacgggcgaatgctatagcctacagttacggttgagtggcctaacacttaccagctaccttaattaagagatgcctaaccctatttttcccctcccggcagtggatatcgttgctgctgtattgtatgccattgttttcttattgacagctatacaatggatttgatgtaggcctgggtctgaagcgttccagcttggcggtgtagtgatgatctctttggtcgataccacagaaaagacgctgaacacggggaaaacggtatccaagtaggtatcattatccagctagtagcatctagcttgttcgcagtagcgcttgggcgtttcagtttcaatttcacttccaagcgcttcacagggtctctaggttcgatctgtctctcgtcgacttcaccgaagccacgacaggatatttgggcactcaggggggctgccgtatgtatttgataccctgtatacctgtccatgtgttgccctttccgtctgccggcatccaggaaggtatctgccatacttgggctttcgactcccaaagggtccacacggtagcggtgacccggagattcggatgcgataagaatggcggggtcgatcggctttgggtctgtggtctgtgatctctgcatatgtattctagtggagcatgggtgactgctgtgttcttgcatcagtatggagtatcaatgtgcaagcgtggccgacagtggcttgcgtagctttcgtggcttgaacatttcatattaaatcatggatcgatgttctttgctatagacatagcaggggtaaagtgaagtaatctagacaaggtaaggaggaataaatgcagaaagaatcgatccaagcaaggatggttgcaccaaggccagatgtgtggctggagaacatacaacatgttctagaataaaccttccaaggacaagccctatatgcatgcctttcaagggcattgtcgaataaaaatatcccttctaaatacgcatatgttgctcgtaccttgtacatatttccccctggtatgttttgaaagcggtacctgagctacgtgggtcccccgggtccttccaacaccttggcctcttacgccttacgcaaccacacatctccagactccctctggaccctctattcaattcccctcaccatgatagaaagtctatagagtgaactgcgagatcatcatggagggactattcactctgctcgccctgagcattgtgatggcaattacgtgagctacctgtgttcggaaacctaagattcacttggaagctaatgctcatgattggcagatcctttgtcgtcggctcattacctctggcttttacactgtccccctctcaactccgcttgatatcatcgattggtatgggcgttctggtggggacgtcactgatcgtgattatccccgagggcattgaaactctctacagcgcgaacgctctcactcgcaaacaacacagtacacgggctaccgctattgaatggcagcaccaggccccggtcgtggcagccacgtttggcccgaacggagacagcgcctcaaccctaccgtccgatacccctgtcccgggtcttcttctggaaagagaccaactctccgagtcgcaaacacttcatgtccgtaaggaggattcggatgaaacaacggccaaggacacaatccacggagacgaggagagttcgccacatgcgtgggtcggaatcgcccttgtcagtggtttcattttgatgtacctcgtcgataaattgcccgaattcgcagcgccgacaaaaaacgatcggaccccttaccatatctctttggataaccttggatctgggttgcggcggggttcctccccctcccgcgatggtggactgcttgatgcgaaccacgcgtccagacgtggccacagctttgcgaccacgaccggcctagtgatccacgccgcggcggacggtattgctctaggcgcttccagctcggatgccgggctcagtttcattatattcttggcgataatggtgcataaagctccagcgtctttcggattaacatccatcctgctcaagcaagggctgtcaagtcgcaccgcgagagcgcatttgctggtcttcagtctggcagctcctttcggtgccttggctactttcctctttgtacagatgatgggatcttccggtgccgatgaggcaggcactcactggcgcactggaatgctactgcttttctctgggggtacctttttgtgagtcttcttttctcggtcagaaccatagacctttatattaacccctgcaggtatgttgcgatgcacaccatgcaagaaaacggcccgggctcatccccgcgcgaacttcctatcaacggatatggtgaccgagaccagaatggatcagacaagtccatgagagacttgattgcatctgttttgggcatgatcttgccactattcttgcaaattggacatgctcattgagcaagtgcccgtatgtattccttggggatacgccatagtgcttttacattttcgctcttcaactagattttggagggcttatacccattgcaaggtacatttgggagatgggttattctagctgagataaattgagatacgggaggatatgtttgaatagatttccttgtataactgctgggtgctatatcggtcataattgcatgatatctcacgatcacatctacgtagcgtcactgtgccatatttaaagcatgacaaggtccccgacgtctgacttctccgaagaatactttttatcttcccatgatgtcggtgatgacaagattcgtcagtttcgtcagtctgaatcatcccggcgttcttgacaggttccacggtcccattccgatagccgcatgccaatccacagccttgggtcaatatcctcgtgggtgttaatgggtatcgtgagtgtcgtgaatattcaggttgccttgacagttcacgagattcagccccggagatctatgacttggtcttgggccaaagcacctgcgtgtctacattctcgacgcctcacttttgcctcttttgtcataaatccctaaaaggcaaatctcaggcaaatcagaaggcaaaaagatgcagaggaaacatacgatcagtgtcggacacataagatccatataaatcccatctgctgaactagtgccggcgaggccatgctttgtcagaatcacgacacctccgcttcaactgtcccctttcctcgtcgcctgctttttcattggaagtcgatttcggactttgattgaatgaaaaagaaacgacaaaaaaaagtgatatattcgaaaaaaagaaaaaaaagaaaaagaaaaacggggggcctcgatacattcggaggattattagtctcacctcccttcttccctcggccgttcgccagcctctcctcataaccccgaacatcatactcttgactcccgactcgctcataattgtatgccggccctgaacgctagaaggctcagtgcgttgcatcaataaatacaaatcggacaagtgggaggatcatcctagactgtggcggcctcccccctgttctgcggccatggactcccatcgggcatcattcagcgacatgggagatgggtcgaatgcgcacacaacagatccgttggaccctcatagccaaccgtcccacgaatcagtcaatactttcgccagtactccatccagatcactcagcaccaagagcaccgtcactcctatacccgccaacctacttccttcagcgcccgcatcacccccgacacccgcgcccagccctaccccccatcaacgaccaccaacttggcacacgaccgatgacgaagagactagctttttgttaagccttcgcattcacttcagtactctatccaacggtcgaaaacagaaactcctggagggccttttggacatatgcgacagccagcatctgagctttgtgtcgagttatgttggacctcgattgaggaaagacccatttcaggttttccctaatgagctatgcttaagagtgagccgtttggtcgagttctcttcttatacagtactaatgttgcgtctgcttaggttctctcctttatcgacgatcccaagactctcgcccgagcctcacaagtatcacggcgttggcgagaactattaaacgatgacattacttggaaaaacctatgcgagaaacatgcgtactcggtgcgacgggtactggacgatgaggcggacctcgtcgacccattcaccgcccaccccgtagacccggtttctggctcacgcaccttccacggcctgcagcggcgcttgaccgcatccagtggtcaggccacggagagtgcaccggagctaccccgcacgctttctggagaatggttgcctccgacaagcttctctcgaagacgtcggacccgacctgtctcctaccgttcacagttcaaacaaaaatacatggtcgagtccgcgtggaacaaaggtggtcgatgcacccagcgccatatcactcctgaccaaggtgtagtgacaagtcttcacctcactccgaagtatattgtcgtcgcgttggataatgcgaagatccacgtatatgataccaacggtgacaatcaaaagacccttcaaggtcatgtgatgggagtatgggcaatggttccgtgggatgatattttggtcagtggaggctgcgatcgggaagttcgagtatggaacatggctactgggtaagacagaacatccacggcttgcacgaacaaaaactaacacatgatagcgcggggatccatcttcttcgaggccacacatcaaccgtgcgttgtctaaaaatgtcagatcggaacaccgccatctcaggatccagagacaccaccctccgtatatgggatctggctacagggacatgtcgtaacgtcctcgttggacaccaagccagtgtaaggtgcctggccatccatggtgatctagtcgtgtcaggcagttatgatacgactgcacgtatatggagcatctctcaaggccgctgtctccgcaccctttcaggacatttcagtcagatctacgctattgcctttgacggccggcggatcgcgacaggaagtttggatactagcgtccggatttgggacccgcattctgggcagtgccacgccattttacaaggtcatacgtctttggttggtcagctacagatgcgggacgacaccctagtgacaggtggctcggatggctctgtccgcgtttggtcgttgactaagatggcgccgattcaccgtcttgcggcccacgataacagtgtcaccagtcttcagtttgataagactcgcattgttagtggtggcagcgatggccgtgtcaaggtttggaacctacagactggtcagctattgcgggagctttctactccggccgaggcggtttggagggttgcttttgaagatgaaaaggcagtaatcatggccagccgatctgggcgcactgttatggaggtatgtggcgatgttctgtcttatgagaatatgttttctaatatatatcgcaggtctggtctttctctccaccacccgatgatttcgatgatacagccagtgagagtggtttaatcactacaggcacaagctctgttaatgaccgcgatctggttccaactcgacgtcgaaccctctgctccgtccccgcatcgatcccgttgggcactgatagcgatgcacttatgccagacgcgccctcctaatcccttagcatttgctggtctgaacagatccaaatgcgttttgatatcctgccatctaacgactacgcatatctatttatttgtcatgtttctctccccatcttttgaagcgcggtgtgtttttttcaacagtgggtgttttgccttcagaatgaactactggcgtccctccctatgtgtttctagagcaccaaacggttgcatatttggtgtcacaaatctgtttggttactgtgccttgttctttatccagactgatgaagttgccatattggagttgtgaggcctttcttttacattgttcttatttcatatcggccatttcggagtgttttctggttgagtacatgataccttttggggaacacttggaatgtgatttatataccatctagtccgatgaaatctatcatttacattcctactctttcatctcgcccaagtttgaagctcaaatgtccaaatgtccaactcgtggcctagacctagaatgactaagcgggtctctggctcaccccgttcggggaatgtcccagcatcatcttctagaccttaacgcgagcattggttactgaaatacagaactctgctttagaaaggccattcgtacatcctttaagatgtgtatgtgcttcgctttgactaggcagccgagttgatctagttaccaccgatgacatacggccgtcctggacctttgtgaaacccagatctgagtccgacctgcctgtaactcgcagtcccctttgcgctttcgctcaaagtacccgcaagtcttggaggttccttagacgactgccggcgggtaaacaatggtctatgggggcaagccaagtaccggatgttacctgtgtcgcaagcggaagataaaggtatgttccgagcttcaatatttgtttttggatttaccccgccaatgaatctgtattgtgtctgtacttatctttcttctttgcatgcattgaaaggtcaaatgctaaattcctcccttcaagtgcgatgaagcacacccggagtgccggaactgcatcatctatggccggccatgtcctgggtaccggccggatgctgtctttcgcaacgagaccaggaaagtcgagcggctggtgaagagcaatgccggtgtaaattcccatagcaattccgacagccagaacggctccccaacggcggactcatctatgtcagctgtctcgcaccgccgacgcgcaaactcacatgccaaacaccatggcaaggctaccctgacgctatactcgcccgctgactccagctgggagcaacgagcactctgctacttcttcgaccagtacaccatcaaagctgatgccgatgatggcggacacctcgaatatctacccccgctgtacgcccgcgagctcggtcgccagagcagcgaatcgccgtctccttgtttgcggtgggcggttgatgccacggcgctgatgactctcgctaatgcgaagaatgccccacctctcatgaataaggcgcgggagggctatgggcgggctttgcggggcttgcaggaggcgttggcgtcgccggctaatgcggttaaggatgagacgtttgcttcggttgttttgctttcgctgtatgaggatatctcgggcgagcggaatgggctactcagctcgcatacggccgggtttgagttcttgatgaagctccgtggaaacacgctggttgatcatcagcgtggtcgagatatgcttacatttgcttatgcccacacggtaggtttgactctgacatcgggaccgtataaatatcggtccgagactgacgtttgtatagtatgttgaaatacttgcactgggagacaagccccggttcgacatcaaatgggacctcggcatgctcaacaccaatgacccagtcgagcggctcatgttcaccgtatcaaagctctgtcagttattcctatacataagatctccaccaaacctcccagaccaagcagcaatcgaatcatggatcagagccggcctcgagtacgacatcgaaatttcccaatggacacagaccctaccagaccgctggctcccactagtcgtctactcagcacagggcgagctcctactaacatacaaccgcctctccaacgtcgtgatctggaactactaccgcgcagtgcgcgtgatggtccagcatcttctcctcggcctaaacactacacttatctccatcaaggcagcgaacaaacaattctccgattccccgaattccagttccggaccagagtccgaacccgttctcgacgagtcagctctaaaagccgtcatccgcgaaatgaccacagacgtctgtcgcagcatccccttcgcgctggctgacgtcgactccctcggccgcccgaataaatcagatagcgcgtggaaaatgcgcgccgcgcagggctacggcttgctctggcccctctggtatattctctcctctggtttgccgaccccggcacagggggagcagatccgcactgtgctgtcgcgtgtcgggtctacgcagggcattaaattggcgttggttcttgctcgtgaggcggagcgcatgcgtggagagcaggaggacgcgcagggtgaaattcttggttgggatttaccccgtggtgcgtacgatctcgataactaaacttgatgcgtgtgatttgagtgccgattgcgcgggatctgagagctatgctgtaccactatgacttgaaatgaaaaaaggctcttgggagaatttcagtcactgaatgctctgctaaacgcataacggcaccagaccagcaccagatcgtctgaatacggctgggtagacttggagccagtcgcatgttatacatggaaaagtcgttttacacattttagaccttttttcaccgcagatattttctatattctgcggctgttgattttcatatttctctataacactcgtacaaaaaaaaaacataaagatcctcccaaatctcttctggagaccaaatggatcagtttattcaacctcgtattattgtctagtactagtggcatctcagaatcaatataaacattagaactacgagtgtattcagtctacagaaaacacgttctcctcttccgactcttcgtcacccgactgcggcaaaaaccctttcctaagcagtgctgccttcatccgactgtaatcctccgtggcgcgagcgatgatggctgcaaggtcgttgtaggtatcaatggcatggcctttatccttcatacggtacacctcggggtcttcaagaggcgagttgtaccaggtcgtgttgaatgggagtcccccgttcttgagcttaggaggtgcgtccttagtggcgcccccactgggctttgcgggtccaggttctggcttgcgacgtttaggcgcgtccttggtggtcccccggctgacccttatgggaccaacatttgactttcggcgcttagcgggttgctcttcgtctatatcttgagtagcgggtgtcccgtttgagacggtgcttccgcgcacgcgtgaacttccaatggtaggttgatgtgtcgggggatgtacaatagacacttctacagctgcatgaggagattgttgtggttcacgctcagagggtacgtattcgtcatcaattttttcggggttcgggtgggccacaggtgcagggagatttcgactagtcgacttcgagagctccagggcgatagctatatcctttgcgctgtagtatgtgcaaagcaatggattcgagggctcgcgttcagccacggctgcgataacccacgcgggcacattcggagatacatcaggacctgttcgcacatcagtattatcgtacttcgtccacagtatagagtacaacgtacgaaatgaatattggtagggtcttcgaaaaaatacacaactagcacatgcccacatccattgtgcgttggtgttcgcgaaaactatccgacaatgcatgaattgacccttgccatgggcgcagcgcgtacatttgtgatccgctggggcttcgagaccacacaactgcccctgcgctgcacgccgatacaaagtagatatcaacggcctgggctggctatttttccaatctagttcggtccgctcggggtgcaaatcgcggattttccgttcggctgccgttagaaaatttcgtagcataggcaatccggcagtgtctaggcccgggtagtgagcttaacaaccctattagcgaatgcgcgtgcttgcagggccgaaaaagaatggatatagtgctcacggtcctcgacttgcgctttgatggtagcgtcgagctcggcggccgtacgggctcgaaccgacgggccagggtcttccttctgagcagcgggcttacgcgtcatcgtcgcgacatcagtcccatattcgccgttcgtctggtatggataatcagtcgcatcgtcgtcactactgtcagattcggaggcttgtaggggattggaagagattggagaactgtcggagctttttattattgcctgagcgagattgttggtaagcatgctgtcttgaagtgcgattgaccctcgagagttgcgcttgaagcgaatctcgcgacccatagctatcgtctggactcgtagcagacgtgttgaaagggcttttgtttcctttttggtgaacagctcggaattgaaatcgtccagcacttctcagctctcacagttcaggaacttggaaggaacgtaaaaagagaccatatgatccccttctaatcccaaaaggtttagtttgtggttgagtatcaggtaactatgttgtacgtcattgaggctgaatgcgggtagacacctgataaacaaggtatctgtctcaactagataactataaccgcattgatccaggtagttaattcaagggctttatatcctcttactctcttgttttccgggatctccttgtagttgtagtcctcggggataagtataagaggcattcctctgtatcagctgtaagctcagataagcgaagctagggatctccggctaagtcggcttgttgtataccactgtagcaccggacttggccggatatcattgacgtcatttatataggaccatggcgaatgcccttgaatatcagttgatttgcagaatatgcagaaaatcaatcgaggtcaataaaagacagtaaatcaacaacagtgcacctggaggtgtatggagtagacgaagataccaaaaaaggaaaaaaactcgggaggtgcggagataagcacaggcccactgacgacatactccgtagtttcttccaaggtacaaagattggaagcattcggactttgcttcttacacctctcccctcttctttacagtatacaccatgaccacacaagaacgtaggcttccctttgggaagatcgagcccaattcgctcaagtactttgccagctgtgcactgggcggagtcatcggtatgtccaagctccccatcccaccaaggcacgcactaacaatattactctagcttgtggtaggtgacagctctccaatttgcaactaactcactcaattgacacccaattccatataggacctacccacacagctgtcacacctctcgacctcgtaaaatgccgtcgccaggttgatcccaagatctacacctccaacatccaagcatggaagactatcttctccaaagaaggcctccacggcgtcttcttcggttggtccccgaccttcctgggctactccatgcagggtgctggaaagtacggtctgtacgagtacttcaagtacatctacggaaaccagatgttcccgcatgccaaccccactttggtcttcctcggtgccagtgccactgctgaattctttgctgatatggccctgtgccctatggaagctatcaaggtccgcatgcagactacgctgccacctttcgcctccagtatgcgtgagggctggggtaagatcgtcaccaaggagggttatgctggtttgtacaagggattgtaccctctgtgggccagacagatcccttataccatgaccaagtttgccaccttcgaggagactgtcaagctcatctaccgcaccatgggtaagcccaaggaagagtacagtcaattacaacagactggtgtcagcttcttgggtggttacattgctggaatcttctgtgctcttgttagccatccagcagatgtcatggtcagcaaattgaatgctgatcgtaaaggtgagttttttctttttcttttttttcagccgtcttgatgtatgctaactgcccgtgtagccggtgaaggtgcgatgacagctgtgtcccggatctacgggaaaatcggcttccccgggctatggaacggtttgcctgttcgtattgtgatgctgggaactttgaccggtttccaatggctcatgtaagtgtttgctccgttctaatttgcgtgcacagcgatgctaacatccttcagctacgactctttcaaggtgttccttggacttcccaccactggaggtcactagatagtcatggtccttaggtagtcatggttcttggaggttcttttttctagagaaatagtgtatatagcaaggagttaaatggataaacattgataaaaccatattgtgtagaccgccttcgatatcggggcagaataatgttggaggtcatcgcattgttgccgacgacgtttggcactcctcagtcgggtcaccatttcagtcaatcgtactcactctcgtcaccaacgattaatcaacgactgatataggcatactatatcccgctgtctatcatctgagcatttgcctcccttgtatattccacatcacccccttcacatcgtgcttcgagctctgaccaagaagctcaaactaccgtgtccagctccacacacaaataccgacctcctcgctcttcaccaaaatggaagcctcccgccaaccctcctccatcccgccagccaatccccccagcgtggaaatcgcctacaagcgcaagtgcatagcgctgaagaagcgcctcgccgaagtcgaagccgagaatgaaatcatgcgcacccgcaaccgccgcggctcccaatacatccagaaaatgcgcttggaaacctgcatgctcctcgaacgtctaacaaaggtcaccggcatggccgacgaggcaaagacaggcaccgcaaacccagaactgcgtgcccgcgccgcagccatgatgaatcctgcacatggggccggtgtgcttctggaagacgatacggagggtagctccgatgagcagccgcgcacagtacgtatctgcataatccacaaatcttaagaaacctatacagacccactgcccggcctatactctcctccctccgtctgtctgcctgatccaagctaactgtgttctttctttatattggatagcccgaggaacgcccgctacgcgttaagcgctcccgcaagtccaacgccaccggcatcgatggcctggacgatgatctccccgctcacgatggacatcccgaatctgtagatcccgctgctgctgcccttccccgtcttgcgccggctccgacacaggagtctcttactcattccttccgtgtgcagacgggcagtggtggctctgcggaacagactcctgttgctgctgaggctggtcctgaggctgtgactacgccgatggatgtggatagggaggaggttaaggagcctaaggttgagcaggcttagtgggtggcttgggtcttgtcgtgtattttctttaattcctttctgggctttgcatagcccggactgagactccgtttttgttttcatttgagggttttatgcatcgggttctgatgcggtgccggtttactttgctaggttttttctttttttttcgttcctttggtgggccttaattgggcctttccactactatacggtctcctggtgtctatgtctgatatgaaattcgtctgagaaatcatgctgaaagcatggatgaagtaattggttcctccttgggcttttgatgtcgctcatttagactaccaagtctgttatggtcactgctagtcaagtcagtgcatagaagcagacagagtaagggaagtggaagagagagcaggctagtggcaatcaaaaggtggatttctgtagttttagggcacggctcaacatcattgtgatattcgggcatcatagcgctgataggacgtacgaactacgaacacttagttccatttccaaagttggaaaacgtctctgaacttatttcgcaaaggcccatagcgattcgattcgattgattgacaccatctgtacagtaatcacaacgccgttttccccgtcacagaaccaacgtcaactccaataccagtaagaaagacagcacactattggaaacaagaatgggatgattatctgggtatgaatgtcctctgtcatgtacaggtgaagacataacgagtttggaaaaatgatacagattgcaagggttgatggtcaggaagattagacgcgggtgtgttttatgttaggtgcttccccctggcaggcggtgttcctggctcggctgtcgatgtagagtcgtattggattgtatgaaaaggcacataagcatataaaagcctaatactcgtagcacaattgattggtcgagacaagcgtcgactagtctactccagcgtagagatcgacgacaatgttgattccagccacgagaatctctgcggcgatcaagacaatgactgatattcgttagctaggttgttgttagaaatcacaactctgggagacttaccaatccattcgagatattcgccatggcgatgtgtcaattgatcctttaggactgcaagcagatccgcaatgacatccagacgttccgtcagcagactaacacgctgatccatctccaggtagcttcggactgcctggtagacaggttccaactgcggctctgcccagaagagctcagggctatcgaggacagacccttgcaagtgaatattgatgcggagaatgaagagctctccaatctgcatattgatttgccgacgggtgagattgacgctaccggtttgcgcaatctgggcaggtagcggtgcagtgtcggtaattgtttctgacacaagatcttcgaaaagcgaggtcttgaccgattgggccagagcatgagagatcgccagcttgaccatgttgttgcgcggatcgcgaagagagatgaagtcgttgtagatcctagcctgatactcgcgcgcatagtagaaattgaagttctcaatctgcgtgtcatcgggactcaatatggaggttgcaaatttggagatatcggataagaatcttgattcttgcgcgggcgtcattccccatattacaaccgttccgtagtcaaagaggaatacctcgggtgtgtggattgtggtgtcaataccaggagtgtctttggcgactacctggtcggcatcattcgagtgaccgcgctcgtcgtgcagatcaatcaagtcctctcttctggtcttcttattgtcttcaacctccaccgcactatccgagtatcttctttcactgggtcgtctctcatgatgtccattgccatttggatctaataaccgtgcgttctgcttttcctcgtactcataatcaaaaggagagtacacgcattcatcatacagcttgggattggctccgcgagtcttgctccgcgatttgaggaacttgataacgccctcaagtcgatatgaattggccgtgcagtaagctgtcactcgaggtatgcgatcgcggtcggctttacccaatcgtgcagcatggcttcgtgcggcagggtccttgatgcgagttatttgtgaatagacatcccgagggaaatctccttcagacccttcttccccctcttccgtgacagggtccggcaacagttttagtttttgtgcttttttggttgtccgctgcggtccaattttagatgccgcatgtggtgtgttcgatacgttagagggagccccatgactattgcgacgacgaagcttgctgtttaatgccgagagcatgggctggctgccaggacggggctgggcgttgacattctgcacaggaggtgagcctgtttgcaacggccgaaatgttggatcggaggtagaggcagtgccataagtgctgatttgtgtgagcggattgaaggataccgaccgcgatgtccggtttgcccgtggtgacgtatttgaggccgagttctgcggcagcagaggagaattctcagcgtcagacgccatggcaaaagagataaaaggtgtagagttatacgccgtgtgccattgacgaatggaattggagctagagaagcaaaaagtgatgaggaaaaagttagaggaagctggcaacgttgagaagctaaagatgtccaccttaataatctgagaatctgcccgagtccggtccttggcgcttttgtatcatttcaatttcgacgcttctctgtatatttcgaggtttcgacagttctatctttatatcttttggaaagactttattgccagacattattagacatgattgactgaattctatatacataaccccccaaagttgaattgcagaccaggtcttactcccaacaccatgcaaccctagtaacacttgcacaaaaatccttttcaatgatcgatcacaaaatggctgcagtagacgcggggttggttgcatgtccaatcgacaccgactttcgattcgcgccaatcgggcatcgaaaccccccgaaaggaacatcagtcgatgcaagtgagcatgtcccccgttggcattgccaggtcgtagatgtaacttccagctatgtttgaagatatgtgacactgaacaaaactcgcttttgatggccgtagaccattttcaatttcaccgacgaacaaatccagaagggccgcctgccttctgtcggagcccattgccctgagctatggtacgggtcttctgaagcatgctactcttgaggttccgtccggccttggagatcttaggggccagcgcgggctttgtggacttctttgacgatggcgcatccagcacccggatagagacatctcccaggttgatatccttgggaatcttgtcctgcttgtctaggaatcgcaacttatttgacttttgaggcatggcaaattgatcttcagccgggggtgtaggagggcgaatggcgaactcagcattcaagatgtcatcgggaagcaaagcaggaagcgcggctcgtcgtgcatcttgggtagttgtgccttggagagtagcggtgctttcggaacgcatgtcatcggttggagactccttgggcttgacaatcgatttagcttgcaacttacgacgctcatcgagtttccgtcgcttctctctcttcagttgctcttctctgtgaaaaatcattagtcaacatcaactttaccaaatgaaaatcacacgtacaattgcttggaagcttcttgcttcttagcctgctccttcattttcaatagctgggcagagttatcaatggtctctggcgcatcatcgtcactatcgtcttcgtcgtcgtcaccctgtgtaggtgtttccgaaatctcttctggctgtgtttcgagtgtttcaggttcctcgctaccaaatcgaatcttcttgcccgcaggtgctttatccccaattacgatagatttctctgggatatgtttcgtagcatctgcggttccagtagccttcggatcgcttcttcttctccgcttggtctgctggtcttcggtcttgctagcacttgctgactgcgccttgcgctttccactcgcaacttcggtcgcaacatttgcgcgtcgggtagctgtcgccatcttggaattggtggcagaggtgccggcggattggggctcttcttcttcgggctgtcgcgtaaatagacccttggcagcagtgaccaagtgagcaaacatagagtaagaaggaaattgagaaataaagcaagaaacccaaatgggggatacggctcctcgtgttggataagaagtgaagcaaaaataaaaaatctctcggcgatcaagatttcccgagagcggagacgataagcaactctttgctatcacttctcttcgtctacttcaccttcacttggtgggcaagtagagtatcttcttttaaattaattaaatcctctttgtctagtcttgaatatcaagttcaagcttctctaaacatcaattggtgctaaaaatctgcgcaaacagcggatttgctctacaaagtcaaaaatatatatatcggtgtcggtgtccaacaagcactgccaaacccaacgtatattatcgcatgaaaacacaatttacctgacatttattgcttggattttgccagatagaacccagtgagcacgaaccaagcaatttgagctatttgttgcaagtcatctacagagtcatacttttctctgctgtctaccccaaaactcaagaaagaaaatatctaaaaatgacttctaaaatattactatcgagccaacggatcatgtcgtttccaactacataggcggacgattcttgacacgtaacatatatgcaatgaagcataacctctatatactgattacggcaaggctgccgggataaagcttatgtcaaaagtaatcctttacccccgctcaagggaccaaggcgtgttgaaatggatatggcatgaaccttgaatattgtacaaccagatgcaaatgataccaccctgtgtgtagactccatcgaaagataagaacgctgtatatagccccaagttgaacgcctagaccgtaaaaaactcctggaaatcattactcattgataccgtagaggttcttataaaactcctcgtgcttgcgaaaacactcggcgcgttctaaagcctcctcacgagaccggataaagtcgtcctccccaatggggctgagctcctcccacatctgattatattcgtcttgatcactgccagtcatggcccacatgctctcgcgctgacgcttgttgcgctcccggtcttcctcgatgcgctgctcgatctgcttcttgtcaaggcgcagttggggcttctcagacttcgacttgctgcctccctcggggccttcctcatgttcaagatccaggtgggagggatgggaatcgcggtctttcagagccgcgtcgatctcggccacggtttcggcgctgaggacttccttcgctcggagaccgttcaagacgtgacggacgtgcttgacattggctgcgccagtgccatcgggaggaacgaccgagtcgaccacgcgcaaaatgtctcgttgcatcatgcgcacgtatgggaggtagttttccttgatggccatttcgcagaggtgttcaataaagtacatgatgttcgcacgattgttcatgttgttctgccacatgtaaagtcagaatagatcaacacacaatgaaatcggagctcttacccgctcaagctgctccaggatgcatgagtgaagatcctcatcgaggtcacggtacttcagcgcataatgcgcagccttctgcgatgatgtcacagcagcactgaggtgctgcagctgtgtagtgaagcgcatgcgcacctcaaaaggatcgatcatcattttatcttccggtgttatggcttcctcaagggtaggaagatcagtagccgtaccggtagagatgagagcggtcagttttaaaaagccgacagaaatatgtggggtcagaaaggcggtggggcgaagccgcaattttatttcgataacctgctacgtactccatacataacgtagcgacttctctggcatcatttgaagtgaatattcgtgaacattgtaacaaaatcaagatacaccgagcaatatggtagcaaatatcatcaaagggaatcccgcctcagcgaactaccaagactagatgtatcattcccatcaagcaaaccaacctcttcagcctcattacgattttcgaaatcctggtattcttcgtctcgaagggcttcttctcggcggatttccacgccattcagcactgaccaaacatctttcttggtcagtagtccttgtagaatacccttgttggcaaataacacataacgcaagccaaggcgctggaacattttcaaaacaatcaaaaaggtgatgttactgttcaatgtcatcggtgtctgatccatccaaggtcgtagatcaagggtatcactagggtctgcaaaaggttgatgcgaaaagaagacctgtgtctcgtcggagaggttgcgggctgtaccagaggtcgagtatttcagcgcaaaagaaatctcattgcgggtgatgtagcctagaaggacgggactcgacgtgtctgatactatggggaatccgcgatatgtagtgttagctaggaggttgcggatcgaggcaatagtatgaccggtggcagtaatgatgctgatatcgtccacggttgtcatgacccggttggcagatacgtctggcggagtggtgtcatcacgatgatcgaggaaaggatactcgtttagtcgaatccatgactcgtagatacctcgcttcccgaagatgtcaccacaccacttggacagcatcacagcaatcatgatcgggatgacgtaggtcagcgcgccggtcaattcgaacatgataacgacaattgacaaagtcattcgagtagcaccaccaagagcagcagcagccccgataattgcgtataagccaggtgtgacacatggaatgtctggctcgcacctgctaaacaggaatgcttgcggataagattcttgccacaagcgaactataatgcccagagcacgcccgtaaagagcaccgatagcgaccgaaggaaggatgatacccgcaggaatctcaagtccaaatgtcaaggaagccaagaaaaaggcaagtaaagcagcaacgaccaggtagattgccacgccgattgaggcagatcccgtggcgcagagaccaaatcgatcatatgtcacactgttgcactcggcgaacagcgactggacaagctccgagttctgagcccgcatgaagtgatttggatagttgatcaaagctgtaatgagagccacgacaaccacttcgatgattggtcgagaggaagtccgagctcgcctccatttggtgactttagtattcaggcggatgaggaatgcaccgtagaggccgccaatgatgccaagaataatgaacgggatgatctcaaagcggtgccagcctcgagtgtaggtgacttgatacagcacaattttacctgtccggaatgggttcaaggcttgcaaagtgacagctgcgaccatggcacagacaaagctttgccacattgtcttgtcgggaaaataatatgaaagttgctagaataatcagcaaagtatataggacaagattgaaaatggctcatacctccaaactaaaaagaacacctccgatgggtgccccgaatgcgactgatatacctgctgcagcagccgcagaaagaacctctcgtttgcgtgctgtgaaatgagtaaatgcgcagagggaaatatagaattaatcacgtaccttcattgcctttcaggctttcaaaaggtttcatcaggatattcgcgcaacagcatgcaacatgcacaagtgggccctctttacctagccatagaccggaagccacagaaagacactgatcgttgtcagcaaaaatgccttataacaagaagaagcttgactcaccaggcccagtgatttaatggcaagtgtccatggtcccatgaaatgtcggatgacagttccaccgaggatcgtttttatctcggggattccactgtgtctagcataaacggcataatttcgcaccaagaagcaagcacatgcagcaaagaaaacctagatatgtactgtcaatagagccctaaaggtaagagacagagacatcattaccgaaaatgaaacataaaagacatatccaaccgtatatgcccctccactggactttgcgcctaatgcatttccccaaggtgtccagtctaaacacttagattgatctataccaaatccagattcagtagtgagacttgtagagatttgacgccatcggcttaccatcgagaccccagcagcaaaagctcttgttgagataaaacttgccacctccacttccatttttgcaatatccggacttcaggtcacctagccaatccgttgcaatatcgatagaagcagcgattattcctacagcaatgcctgtcgcaatcaacactaaccagacattgcttgcgtcaagcagtcgacgagcatggcccaatagaccctgtccactcgagtaaagaagccgtttcctttgccgctccttggtatactcgtagatccaatcgatagcagtgaagtcgtcgtagcccacacgtcgtcctgggccttccacgtaccagtccaatggcgcgccatcttttgaggcttcagcaccactattgagccctatcggcgcgtaaggatcgagtggcgatgcatcgccgttctgaccaccttgcggcgccggagagccaaagccagtatccgatccgccggagggaggggagagaaggttagatagactgaaccgtgatcgttgtttttgttttcgcttgaaggagatcctaaataaataacctgatcagcgccgtagcgaaaggtggaggctccaaggcatacggctcatgtaacctctcggcttcccgattcacttcttgaggctgaaggatgtcttgatcagatcctagttgcgtcccagattggccctcgccacctgagccctgaccactcattggaattagtataacataaatgaaccgcgatatcgcgatatcagcatctcctcttaaaaacgaccttgtttcaaggacagctttgttggacgcgcaagtgtggcgcaagctccgcgatcaaaagcggtggggctcaggtctaggcggggctgcgccacaggcggcagaaagaaaaaaaagttggagcgaaagccgatgaagcgggatttcctcttttattacaaacttcacagtttctctcacgaccggattaaacatggatcggaggccggtctatgaggggactcttactgagtctgaacttctcgagcagcttccgagtggaatctcgactttcattcggactgcatcggggacgcaacacctccacgctcttgcgcttggcgcattaaacaacgaatttacagagagcattttcagactatacgaaccgattttcgtcgatcttgcagctagatggcttcaatcggatttacatgccgactacattcatgtattagcggcattcgcgcagattttaccatttgcgccgcacctgcgctcgcttgccagtcaatatgcctcatcacagactggacctttggtggctttggccgtgtcgaaggaattaacactgctacaattggatcaagttagcattagacttctactcctcgccctcttccgacttctttcatttgatcttgaaaccttctctcccatcatttcaccgcttcaactgcagtccctcttccaatcccaagatcgagtaacacgataccttgctgtacgatgctttgccttatatatgcacgcagccgatgcggcaaccgaaaagatggtccgcgtcaataccgggactgagcctatagaaggagagtgggaaggcactctgatcgattaccgtgtgctaggattgtgggaagaacgccgatgggagactcttgggggaattattcgggccgagaggacttccaggacggaaaacaacaccctggcgttgatcgagaggacacgggactctttcacaaccaagaccgcagaaatctgcggtgttttgattcccaggttgaaagatacacccgcggctccttcgtctgtcgtcaagactactaccacagttgaaaatctgcgccgaattgcagggtcattactcggttacaaacccatcctgctggtcggtttgcccaactccgggaagacctctttgattaatgatattgctgccacgatgggccagattgaaactatggtcacacttcacttgaacgaacagacagatgcgaagagtctgcttggaatgtatgccacttcatctgcctccggatcattttcttggcagcctggtgtattgaccaaggctgcacgcgaaggtcgctgggtgttgattgaagaccttgatcgtgctccatctgaagtaatgggcctcattctcccgatcattgagaggggcgagctcactatcccgagcaggagggagcgaatcaagtgtgccgagggcttcaaaatcatcgcaaccatgaagtcatcgtacaacattgccggcgaggagatcgcaccgagcaattcaatgctcggaagcagactctgggagagagtgcaagtcaagtctcttcccgtggatgagatgcgtgatgtcatcctgcaaaagttctctttgcttgagtctcgtgtgccaactctcatgaacgtctacggacgagtatgctctgcattccatggaagtcttgcgatcaagggctctcaaggccgtaccccgggcttccgcgatttgatcaagttgtgcaaccgtctgcacaatcgcctacaccgcataggtgcgaagactggctatgagcccacgtcagaaggtaccgaggatgaaatattcctcgacattgttgacgtgttcctccggtatctgcccgagaagtcaatgcaaagcactctcgccgccgttgtggccgaagcgcttcaaatttctccccagcgagcgcaatattgtctcaatgaacgcaccccctcttatatcgacaagaacaacagccttgttcttggcagagaaacctgtaacaagatcaaagtaccaagtggatctgcattgaagcttgccgcagcagcttcacgatttgcccccacccgagcggcattaaccctcatggaacaggtagctgcctcaatccagatggcagagcctgttttacttgttggagaaactggtatcggaaagaccacggtcatccagcatcttgcatctttgatgcgtcagaaactcacagtagtaaatttgtcacaacagagtgaaagcactgatctgctgggtggtttcaaacccgtcaacatccgtacaatggcagttccaatgctcgatgaattcactcagctctttgaactgactttctcggccaaaaagaaccagaagttcttgtcgtccatatcgaagagtgccgcgtcttccaattgggtacgattggtgaccttgtggcacgaagccgttcgtcttgcaaatggagtgttcaatccctcgaatgccacaggggagaatggcgatgaacagccagccaaaaaacggaagctggattctcccaaataccagcacttgcggcaaagatgggagagcttcgcaacacagctcggagatttcgaggctcaggtctcacaaggtgatgccaaatttgcctttgcctttgtccaaggtaagattgtgagagccctacgaaacggcgaatgggtcctcctggatgaagtgaacttggcttcccctgatacccttgagaatattgccagtcttctgcaccacggaagtgagggaacgccatctgttctcctctccgaggctggcgatgttgagagagtcttcggccacccggaattccgtatcttcggtgctatgaaccctgcaacagatgctggaaagagagaccttccccccggtttgcgttctcggttcaccgaattctacgtacactcacccgatagcgacttggatgatttattggctttgatccagaaataccttggtgatttgacaatcagtgaccagcgtgccgtgccagacctcgcacagctttacatggtgaccaagaagctcagcaacgagaacaagcttactgatggagctggacagcgacctcatttcagtatccgtactcttgtgcgggccttgatctatgtcatcgaccacgcacatgtctacgggctacgcagggcaatgtttgagggttttagtatgagtttcttgaccgtgctgagcttggtctccgaacgggctttgatacctctacttgagcttcatatctttgggaacgcgaagaacgccaagtctcttctcggacagaccccccgcccaccaactgatggcaatgattatgtgcaattcaaacattactggatgcgccgcggtcctatgctcccggaggagcagccacactacattatcaccccattcattgagaagaatctgaagaacttagtccgggctagttcaactcggcgattccccgttctgctccagggtccgacatcagccggaaagacgagtatgatcgagtatctggcaaaggtgtctggaaacaaatttgtacgaattaacaatcacgagcatacagatctgcaagagtacctagggtcttacatctcgtcagacgatggaagcctgcgttatcaagagggtgtgttggtggaggcgctgcggaacggttattggattgtgctggatgagctgaatctagcgccttctgatgttcttgaagcccttaaccgactcctcgatgataatcgtgagcttttcattcccgaaactcaagaagttgtccacccgcatccgaacttcatgctgtttgccacgcaaaatcccgctggtctgtacggtggccgaaaggtcctatcccgtgccttcaggaaccgtttcctcgagctgcacttcgatgacattccagaaagcgagctggaatttattctgaaagaacgttctcagatcgctccctccttctgcacgcggattgttgaagtttaccggaaattgtccttgctgcgtcagtctaatcgactctttgagcaaaagaacagttttgccactctgcgtgatcttttccgatgggctcttcgtgatgccgatgatcgcgagcagctagcagtcaacggttatatgcttctcggcgagcgtgttcgaaatccccaagagaaagccgccgtcaaaaccgtgatcgaggaagtgatgaaggtaaaactggacgaggatactttgtatagctctgcagagctggaaaagaatgctcctgagatgagcgagcttccaattggtattgtgtggactaaagccatgagacgtctattcattctcgtttcgaaggccctcaagaacaacgaaccagtccttcttgtcggagaaaccggttgcggtaagacccagctatgccaggccgtcgctgaagctttccgacgcgagttgttcattgtcaacgctcatgtcaatttggagaccggcgacttgattggtgctcaacggcctatccgaaaccgggctgctatcgagaaacagcttgtagatgaccttcaaattctccttcacgggcagctgagcggcgcgtctttcgatgacttgaagcaggaattcacagcattgaccgcggagcagcgccaagccaaggatcagcttctcttgaagaagattgagaagaacgctattcgctgcaatgccctgtttgaatggtccgacggaagcctgattaccgccatgaagaccggtcaattcttccttcttgacgagatttctctcgcggatgactccgttcttgaaagactcaacagtgttctggaacctgctaggtcgattcttctcgctgagaagggccccgttgattcaatggttgtggcagatggtggattccaattcttatccactatgaaccccggaggtgattacggaaaacgtgagctttcggctgctcttcgcaaccgcatgacagaaatctgggcacctcagctgtctgaagatgaggacatcttgccgatcctctcacagagattggatctgaaggatgagagcgtcgcaacggctatgctgcgattcgccaagtggtttaaagtaaccttccagaactcctctgccacatcgctctcgattcgtgatcttcttgcctgggttgactttgtcaatacttgtcaaagagcagacaccccatttgctatcgtacaaggtgctgcgatggtcttcgtcgacaccttgggtgcgaaccctgccgcaatgcttgccatttccctcaacaatcttgagggcaaccgcaagtcatgtctcgacaagctgagcgaactgttcaatgtcgatgcttccaagatctactgggaatcgaccaccgtctccgcggaacccggcgttctgcgcgtcggaccatttgctctacctacggctggtacagcagaccccgatcctcaattcacaatggatgccccaactacaatcgccaactctgtgagaattgctcggggtttgcagtcatcgaagcctatccttatggaaggaagcccaggtgtgggtaagactacacttgtgacggctctggccagagctcttggcaaacctctcactcgaatcaacctctcggaacagacagatcttacagacctattcggttcagacgttccagtggaaggaggagatgtcgggcaattcacttggcgtgacgctccattcctacgagccatgcagcgtggtgactgggttctgctcgatgaaatgaacctggcctcgcaatctgtccttgaaggtctcaactcttgtctcgatcatcgccagcaggtttatatcgctgagctggaccagacattcaagagacaccccgatttcgttctctttgccgctcaaaaccctcaccatcagggtggtggcagaaagggtctccctgcatcttttgtcaaccgatttacagtggtctatgcagacagcttcactgacgatgacttgaaaacgatttgttccagacttttccctggcagtccctctgtgcagaccgagagattggttgatttcatttccctcttgaaccaagcgatcacacgagatcgtcggctgggaaccatcggtgggccatgggaagtcaatctgcgtgatatccagcgatggcttcaacttgccgatcgaggaaacctacagatccagacaaagcacttccttaatgtcgttatcagccagcgattcagaagcgaagaggatcgtaacgtggtctctcagatttatgaccgtgttttcacagactctgatactggctcggagagctacttccacaacctcacacctgaatacttgcaagtcggtctgggcgttttgacccgtgaccctctgctgcagcgcttggccgaaccaaacatgaggattctaccaaatgatcttcatattgccgagtcgctcattttgtgtatcgataactcctggccgagcatcttagttggtcctgctgggtgtggcaagactactctcatcagaaagctggcagcggtcaacggtgcaaaccttgtcgagctagctttgagttctgatactgatactatggatctaattggtggattcgaacaaatcgatcatcgcagagaggtttcaggctttgtccatgatattgagatgttcttgcgaaaccagctcatccaatgctttgcttcaggggatgtatctgatgttgtgatttctgcactccaaatttgcgagcatttccagtctgcagatatctcgctggaaaatgtcatcccctcgctttccagcctttgccagtcttcttccgaccctgtctaccaacaattcctcgagagagcccaaaccttgttaaatgcaatccaacaatccgataaaatgaaggttggatttgaatggacagaaggtgtcctcactcaggctgttcaacatggaaattgggttattcttgacaatgctaacctgtgcaacccatccgtcctcgatcgactgaattcgttgacggaaccgaatggcacactcattctcaatgagcaacggacagacgatggatctgccaaggttatcacgccccatgtcaactttagaatcttcttgacaatggacccccgcaatggcgagctgtctcgtgccatgaggaaccgttgtaccgaaatctgtttcttgccaagtgagatgcaagacatccaacctaccataggcccatcttacacctgtgaatcgttcctctatcgacttcgccatatttggaacttggatacctccttgccatcgtctgcctttgaagacgctctcgaggtgtgcttggatcatctttcaccagcggatctggcctaccttcaacagtcaccaagcaaccgtgtggctatcaactccgagcacaacggagaagacaagccatccaatgttctgcagcgctatacctctctgttccatgacaacaaccaatggaagccgcttgacatcgccagcggcgagattgtgcttggtggggcccaccttggtatccgaggaatgttgcagcctcttcacccgcttacaaatgagcctctgatagctattgcaggaaccagtgatttccggtctagtttgattgtcttggcttatcttcaggagctgagacttgatattcatcgcctcagggaaggtttgattcaagccgacgtatccggaaaagagctcaagcctagccaaatgacacgtttggagcggtcattggcatctgagcggatccctgcgttgatgaaagacacaacgcaacctgttgcctcgttcttgtctgattgtggccaggctctgtatgattacattcagtcgttggatcaaatctctctccaaggccctgtaataatcgcagcccttcggaccgttatctgtctatgctgggacatttacagagccacagaggttagtcaggttgatgaaggagaattccaagtctaccttcagatgggccgaaagatctgcgggtcgttgctcgactcgtcccctcttctcaacccgctccaagtcgctttatcacaggccctggatcgattccaggaagggtgggctttgacgactggtcttagcatgcaaagaatctgggattcttggagacatgtcactcctatctctcaagataagttgaattctctaaccgagttggagtcaacagtctttgatttcacaactttggctttgcaaacccgtgtggaattgtctcaattgagtcgtgtgcgcaactcattgattgatgcccagcgattcattcttctggatggtgctgatggtgacgtacttgttcaggtattttagatctgctgccaaacccgaagaattatatatgctaactatgaatagggtatcaaacaaaccgtcgctgagctatctcatgcagttcgacgttcagagtcaaccgagtatccatactttgcaaacgatttcgaagctctttgccagtaccacgacatctcctcatttttccagaacccagtccacgatactgtcatccagacagtcctgccactcctcgctggtcgtgcggctcgtccattagacacgtcgaatttccaaagcgacgtgccaaatattctccatagaatctcgctatttgcgggttcttcaagcaaatccgagtctgcgcttgctactggtggtattatttctctgtcgctattggataagctggcaactatcggcaatacaaaattggggcagatggacatgcttgaggcagagaaacaggctctctccaaggctatttccttgagcagtcaacagatcacaacagaccagtccatggtccttggacgtactatcgctaagctcacagccgagctggtggcttgtcatcgggagttcttcgagcctcgctcagccgaggatctcatctctgttctgcaagcgatccaaaatggggatctttgcgttgaacagtcacctatcaaggttgaactagaccaaagcttgccaaatgctctcttctttaggcccctcgccgaacaggctctaccggctctgatttcgtccctccaagcatcaagccagcagcagagcattcgaaccactggactggcagcagtacagctagcagtcattcttctgcgtctattcgtccccgacaagacatttgacccttctctcggtctcgttgttcaacgcaaacgccactctcaacgtctgcaagaatacacggccaagtctgcagcaattcttgcctttgagaagtctttcaccaaccaggtttccaacctccggtctgaacttctgcacaatgaaatccgtgatctaggttctgccccccctccttcactggtaaaccggccccagcagtcccagttgagtctcttgcagggagagttcgtcaatttaatcaacactgtcctgaagagagacccggagcaaatggtccgctctgccgaatcttcgcagtcccaagacatgatccagcttctgcgtaataacatcaaacaattgagcagtcgtcttagcactcactacagatcctatgacgatataaccgtgcccgtggttcgtttcttgcagcttttggaccttggtgtgttcttggcgtctagccagccggaacagtctggcgatattcctgatattcagtctctgagcgcgcgaacaccctttttaggaggtatccaccaccccgttcttgctcaggatgatcggaaggcccctggcaccctgaagaatgcaaacgaaatgcgccttcaagaactgtcggccctttgggccgccaaggatgcggattccacaatcttgaatacaaaggctggacgagatattattcgccgtgttttcgctgatttccatcaactatggaagactaagctcgaagaagatcgggagctagaagccgaaaagggagaattgtaccgcttcaagggatcctgggaagaggaagaagaagtcaacgaagccgagctacatgcacttttccctacattcgatgaaggatcagctgaagacacagaaacgacggatgctgctgaccgtattgaccccaagagcatcgctctccggcttgcctcgcttcatgcaaatatcgtctcgaatgagcgcagtggaactgcattgactacccttgtcaagcaatcagggcatcttttgggctcaatctggtctgaaaacaagacatcattctcgcctatgtcaccccagaaccatcttcctgcagttcttctacttctcgatgatgccataggcgagggaaccaacaatcaccaaaagaattacaacttctacaccgattcgaatctcgaagaggcaaggaagctggttgctctcgcgctttctgttcaagcccgctttgcccagatccaaactgcctggcctgaacatgttgtcctcgctgatgtcattcaatgctgcgtgcaaatccttcaattcaagcacactgaacctgttgccaagttcatgaccaaggttgaaaagcttcattcattcgtacatgagtggcagaccgtggccagcagagaatattcagctgttaccgtctacgacgagattacatctattctcattagctggcgccgtcttgagctgtcaacttgggctaagctcttagatatcgagaaagagcgatgcgaggacgaggtaagtgcttggtggttcatcgcctatgaagtactcatcggcgctcccatcatgatggtcgaggcaggcgaacaagacatgaccgaacacacccaaaacttggtcttgactctagagcaattcttcaattctacaactacagggcagtttgctcgccgtctacagcttgttgcaaacttccaagcattgcttgaagttttcaccacagattatccctgcctcaagaagcttgtctctgccttggacaacttcctccaccactacggacccttccagcctggggtggacaagtatctgacggagaagcggtcggttcttgagaaggatatcaaggagcaaattcagcttgcgagctggaaagatgtcaacattgtggctttgaaggaaagcgccagaaggtcgcatgtgaaactattcaagttggttcgaaagtaccgtgcagcccttggccagccagttcaatcaatccttgaagcaggccttccggaaagcacggaggagatcacttccatgtcacaagcagagccggttcgccccactgccacgttccccgaggcaatggccatttgtcaaaatgataaaaagctgtggtccactcgagcgctcagatttcagaagccggatggaacagccaacaacatgatgaatttgtattcttcaattccagccgagttcgacattgcgaaggatctcgacagcttcattgtctccgtgattgaaagtatgaatgagttcaagtccaagacacccaaggtcctgaacgaagacaacaaggacgacgtccagcacctcaaatcccagaaacgccgtctctatgccgagaccctcaaacaactatatgagatgggtgtgaaacgtaatgctggatcgagtgtgattgaaacccaagaaacagttcctcaagttctcgccactagtgccgcctttgaggctggcgctgcaacctcaactgcagttcagagtgccgactggtacttccacagacttctggatctcctgcctaagacccgcctagcgtctcgcaactattccgaggagctaagcaacgtcgaagtccaccgaagcatggggtctattgagcatctcattctcaccgtccgccgccagagaggtgtcatttcgcctgccctcacaggcttgggcaagctgaagtctacgcttgacaaggtgcagaacctttgggcagcgacttcaaactatctgtcgcaagaccatgcttctgcatcggagaagcgaaccaatctagctagaatcgtggcttggctagcgcctattcttggacttgccgcaatgattattggagtgcattccaagttctcgggaattgacgcatctaagattgtggaacagctccgcgccaaaaaggcatccttcgatagcctacgcaagtcgcatgaagctcttcccatgcttcctacgaggattgcgtctaacgcaaaccacgagatcgcgcagcaggcacaatcgtcgctcgatgaattggcggctgacttgaagcaatggagtcaagctcgccctgatctgtccttcgcgctggatcagattacaccttgggtcaagacaaaggttgctgatgtccctgaggttaatgatgagaacagcctatccatccaagccttcgatagcagcctcctgacggccattgacaaaatgctcatcggcctgcagaagctcaaggatgtgccttctgccatcacctttgatggattgctgtcgaggagtgatgagttcttctctcgcggtattaaggctgtccatctcccagagatcaccgccgcattggagaaggtccttgaccaattgcacctcctgcaagatcactccgctggcggtctctccgttgctgccgcactgctcaccagtatcttgcctatcgccaacagatactaccaaatctgccgggatctggctgatcggttcatcgccgttcaccgcgagatctgtaagacatcctacatcctgaccaagactttcaagcaggtcgcctccgaaggcttctgtagtcctgccgaagcctcccaagatcaaggcaaggaaggccagatggaaagtggaactggtctcggtgaaggagaaggagcggaggatatcagcaaagatgttggtgatgacgaagatctatctgagttggcgcaacaagagaacaagaaagaggacggtgatgatgagatggatgattccaaggatgctgtcaacatggatcaggaagagttggaaggtgatgccgaggatcgcaaggacgaggaggaggagaacgacgacagtgccgaggaaggagatgacgatatcgacgaagagacgggaagcgttgatgaccttgaccctggtgctgtggatgaaaagctctgggacggtggtaatgatgagcagcagaaggatactgagaatgaagaaggaaagggccaatcggaggccgagcaacaagctgctgctcaggaagagaagggcgacaaggatgaaaatggtgaagaaaagcaaaaggaaggagaggaagaggaagaggaagaaacagaagatgaagaggcccccgaagacgagggtgaggcagttggacgtgaagaaatggacgtcaccgaccctcaagcaaaggaagaagaaacacttgaacttcccgaggaaatgcaacttgatgatggtgaaggcaaggatgacaatggcgaggacgacgatgacatggatgaccttgacgacgatttcggtcccgcccccgaagaagaagcagaagggaaggacgaagatgtcaatgatgaagccggcgaagaagatgccgaggcagcagaagatcaagtgccaggtgaggaagatgaagaaatggccgatgatgcggaggaaaccaacgaaggcgaagccggagaagaggaggaagaggaagctggtggcgaagatcccgaggagtctgagcaagacgacttcctcgcacagcgtgatgagaatgatgccgcaggtgacaacgtcgctcctagtgaagctgttactggcgggctcggagccgagcaagaccaaaatgaagaaaagggtgcatcgggtgacgctcagcaggagagcggctcgactgatcccagtgccaatgtcgaccaacagacaggcgctgctaaggatagcgaggagagccagcccagccgagacgctgctggcggcgaagatcacgggccagatgaacctcagatgcaggcattcaagaagctcggtgatatcctcgagcaatggcaccgacgacaaaaggagattctcaatccatctcaacaggaagaggaatcccaagctatgccccaagacactgatatggccgacgcggactttgagcacctaaaggatgacgatgatgccgcagacacccaggcccttggacaagcaaacgacgaccaaacgcaagccctcgaccaaagcaagggtgtggagtccgacatcaagcctggcgagaacgatgttctcccagacgtgtcggacgagcagcaagatgccgtggacaaccagcttgaggatgagatggaaatcgaccgcgagaatgttcccacagatggcgagtccgttggcgccttcattcctagcggtcaatcatcccacgatcgcgcagacggagcacaaggcaccgaagaagtggacgaggaactggacgaagttgactcgcaactcgcagcaatccatctctcctcttcgcttcccccattgactccacaagacgaagcccgccgcctctggtcgcactatgagtctgccacaaacgacctctccctctccctgaccgaacaactccgtctcattctcgcccccacaatggccaccaagctccgcggtgacttccgcactggaaagcggctgaacatcaagcgtatcattccctacatcgcatcccagtacaagcgcgacaagatctggatgcgccgctctatcccctcaaagcgtaactaccagatcatgctggccgtcgacgacagcaagtctatgctggaaagtggcagtggtcagctcgcctttgagaccctcgccctcgttgccaagagtctgagcatgctggaagctggtgacttgtgtgttctcggcttcggtgacgaagagcacgttcgtgtcgcccacgaattcggaaagcctttctcctccgaggcaggctcccaggtcttccagcacttcagctaccagcaaactggtaccaatgtgcgcaagctgattgccgactctatcgctctcttccgcgaggctcgctggaagcgctcgcctggttccggctctgccgatctctggcagcttcagttgattatctctgatggtatctgtgaagaccatgataccattcgccgtcttgtcaggcaggcgcttgaggagcgcatcatggttgtctttattatcgtcgatgctgtcaagggtagctccatccttgacctctcgcaggctagctttgaggccgatcctggctctggtggtgagatgaagctcaagatgaagcgatacctcgaggacttccccttcccttactaccttgtcgttcgtgatgtgaaggagttgccctctgttctggccactgcactcaagcagtggttcgccgaagttgtggatgtgtcgtcttgatacccccaaaaataaaaggagttggaatgcggatttagagttatttagttacatttgacggcgttggatgatttttctttgtatatgatagattttatagatgtgatacatcagtcgaatgtacaacaacattttttaatttctttattcaaattcccgtatgtcatttcctacagaatgttatggtatctcaatgctaatgcgcttgacaaaaattcccccaaagtggccttacgtatgctacaactaccatccgtacttggatccagcttccctcttgttcctccgacccgttgcaaagctttcctccagtgcctccttctgagagcttgcaacattgagcaattgctgtagggtatgctttcccggcgcaatggagcgtacagggttgtgctgcgctccggctagctcggtttgcgccagaacctggttcgacttgtactcctcgtccgtgttgaaggtacgcacctgtgactgcgacggcgtggcgttccgaccgaagagctggcgcctttcggccttggacaagttcaggtcgttggcaatgctatccaaggatgacgtaggattggatgatactgttgccgtggaatagtctatggcgactgatgcaggctcggcgagtacttgaccagctgctgataactcttcgtcttcggcgttgtataccagcggctggtaggttgctgatggtccaggtgccgggcctggctgagaagtggcctcgtccgaagatagcgagaagagactgactttgggttttggtggtgcaggagcggggacgggggcctgctgtagaggttgagcgctcggcgctgctgccgaggaaggttttggctgctcggcaatcttctcggcattcttggtggtctttctcttcttttgaggtcgtccgacggataacggtctgaacatcatcggatttccttgcaatttgacttccgctggggttttcattgtgtccgccagtgcatctgatgcagtgtcgggttttgagctgccaggtgcagatgtagtgtcctccgcatctccgcccgccagattttcgaatgcgtaatcattcttcatctccgcatcagctgtgcgatcaaacccagggcctgctcccgttttgagactaaacggttttcgtgttgtcgccacttgtgctttcttttcgagtgttcgtttcggcgctggaaggaaagcgttgaatccggaaaagccccctcctccaccgagacgagcctttttgcgcggaccatcttcggtttcttcgccagatgtgtgttcaggttggatttccggaatcgcgacgcggatcttgcctgggttgctgcggtcgaccagggatccagttttggagccgagtttctttgccctgccaaacttgggtgcgggtgtagtggttggctcggcgtctgagccttcagagtcagagtagcctactagacccatgatgggagagttttggtagagttgttgttgtttccatgacgtttgagggatttggcgacaagttaaattatttgccgcctgaccattcaggcatcatggtattacgtaatcatatcatcccgaatctcgatttgggatgatggaaaggagaagcaagacattacatagtggactgagggacggggatggaatggaccaacgagaaaaatgtccgaagccacagcctaaaactctcctttgacagtgaaacaccagggatgatcccatcactttgtaacgtcatcgcatccgggttctccgcttcgaatgagcttagcaggatcatacattggacaatggtgttaatagacatgcatagtcacttggatcatctgaagcaaccagccctaggatctgatctgatatatgtagaagttgagacatgttgataagtcaaaataggagtgactcgacggaataatggaataataacaccaccatgatcagaaagtaagagaaatagtttctaatagagaccaaatcgacctcataaaccaaattgaccaaatattaatctcccaaatagacatatcagctcaataggggtgttcaagagttcaggtgtgaagtccataatgaaagatcaatgcgtcattctggccgctgcccctccccacttaatccggacctcccattccagcttctctccttatccacccccccccccccccccccccccccaaccccccccannnnnnnnnnnnnnnnnnnnnnnnnnnnnnnnnnnnnnnnnnnnnnnnnnnnnnnnnnnnnnnnnnnnnnnnnnnnnnnnnnnnnnnnnnnnnnnnnnnnnnnnnnnnnnnnnnnnnnnnnnnnnnnnnnnnnnnnnnnnnnnnnnnnnnnnnnnnnnnnnnnnnnnnnnnnnnnnnnnnnnnnnnnnnnnnnnnnnnnnnnnnnnnnnnnnnnnnnnnnnnnnnnnnnnnnnnnnnnnnnnnnnnnnnnnnnnnnnnnnnnnnnnnnnnnnnnnnnnnnnnnnnnnnnnnnnnnnnnnnnnnnnnnnnnnnnnnnnnnnnnnnnnnnnnnnnnnnnnnnnnnnnnnnnnnnnnnnnnnnnnnnnnnnnnnnnnnnnnnnnnnnnnnnnnnnnnnnnnnnnnnnnnnnnnnnnnatccccccttccctccttccccccccccccccccccccccaatggccccaaagcccgtctaatcttctcttcatgccgagtttaggaggtttattgaagaagaggcgaacgaaggattcgcaagaccacgggaaaccagatactcagaaccacgacggttcaggcgcatccatgcaacccgcttcacacggtacgccccagcaccacacgggtacgggtacacacaacaatgtcgccagcatcgaccacattataaaccaggagcagccgaagcaagagcgtgttacaaagggaaagtactctcaggaggactttgagcttcagcgcaccttgggaacagggagcttcggccgtgtgcacctggtgcagtctaaccacaatcatcgcttctatgcaatgaaagtgttgaagaaggcccaggtggtcaagatgaagcaaatcgagcacacaaatgacgagcgccgaatgttaaatcgggtgcggcatccattcctcgttaccttatggggaacttggcaggactctcggaacctctatatggtcatggactttgtggagggaggcgaattgttcagtctcctgcgcaagtcacaagtgagtgatcccatgaccacttccttggttttgtgtgtgtgaacaaagaactcatttgtcattagcgcttcccgaacccggtggccaaattctatgccgcggaggttaccctagcgctcgagtatttgcactcacaccagatcatctatcgtgatctgaagccagaaaatcttctgttagaccgtcatggtcatctcaagatcacggattttgggtttgctaaaaacgtgccggatattacatggacactttgtggtaccccagactacctagcacccgaggttgtctcttccaagggatacaacaaatcagttgactggtaagtctgctttcaatgcttctgtcgaattgctctaactgtcctaaggtggtcattgggaatcttaatctttgaaatgctgtgtggcttcactcctttctgggacagcggatccccagtcaagatatacgagaatattctgcggggcaaagtcaagtatcctccatacttgcacgccgacgcagtcgatctgctctctcagctgatcacagctgacctcaccaagcgcctcgggaacttgcacggtggcccgagcgatgtcaagaaccatgcctggttcgccgaagtcacttgggaccggctggctcgtaaggatatcgatgcgccgtatatcccacccattcgcggtggacagggcgatgcaagccaatacgacaagtatccggaagagacagagcactatggccaggaaggagaagatccgtatgtatttctttccatgccacccgcacgcctgactaactagttccagatacggtcaccttttccccgacttctaaggtgcttgtataattttatgacgcgacgaaaagtcctttgggggagggccggaactgattgacctcgggaggagtcgtgaaaaaccaggagccattatatgaaaatccatacttttctatatgcacatcatttttcttagcaattacaatcgaattcttgtgtttcttttttctttcaattgcctgctcgatgtacaaatgggttcgtcgtgaaccctgttctattcccaatctctccaaccaccggggcacaaaaagccacgcccatattatacacgggctaccaggccgcttctatcgtacagtagttcatacacagaggtgtgtgtgtgtgtgtgtctttttcttcttgtttcgtccttcaaattccttgcttctgattcgatgatggatccaacttagcccaggattccgctgccgccctcgggcatgccggtagccatggaggcaatggcagcagcatcctgaccaccgagacgcttggtttccacgccgatacgggcgatgtaggtcttgcttgtggtgttccacatggcgatgtacttctccatgcagctggacaggcaggtattctccttggccgagagcgaggtaccgggggcaggaacgcaggccttgaagcagtgcttgttgattttctgaggttgatgttagttggttgccggatttggatatcaagggtggtgacgtactccgatcagggcgcgggcgttcgacatggcggcctcctgctggagctggcgcatgactgctgccttgatctcctcggaggtctgaataggagcgggggagctagaaccgaagagcgacattatgagagagtgaggttggtggaaaagtgcaaatgagatggtgttgaattggatcgaaccgaagaaagtcggacttcaggatctgagatgcagggttgtggctggtgtgttcgctgcgccacatccgatgtggacaccttagcataacgagctgtatacttcacctcccttgtctccacgcctgaactttgcctattcactctttcttgtcattttttcgacttcctcaaggcctcttttcttatttctttctcactgggttttcgggtcctggtgacaccgtaccccgtctatcccacctccagtctatctttgaaacactttgggctcccctccattgagccctaatacaattccacaatgcgtcttccgtctatttcctcgcttctctgcttcgcgggcttggtcgccttacccgtgaatgcctacgatgacccaaatatcaaaagcatccccgtatgtgctcaatgttgactccgtttcaagccgaggtactaactttggacatctgtcagcttcgcacccatagcctctctccggtatgatcataacccgcgaacacactgtgcacggatcgtgctccgaggaggaatatcagtattgaccgatgtaacagccatacctcgattcagacttccaaagccgctggttcgacttcggaggagatacagtaatccgcgctgacaagtgagatattccggtcttcaggtggactctgtaatcagtgctgattttcgtctttgttcagatacgttcgcctcacggctgaccggccatcgcagcaaggatggatctcctcccgcgtacctctgaccgcaaccaattggcaggtaaattcacgaaccccgcggaacagaatatgggccaaaagctcacgtacgcctctgctagattgagctcgagtttgagatccacggctccggcaacttgcatggtgatggatttgccctctggctcaccaaggagcgtgccacacagggccctgtcttcggttcgacagacagattcgagggtctcggtgtcttcttcgacacctataagaacaaccgccccggcgtgtcgttcccttacnnnnnnnnnnnnnnnnnnnnnnnnnnnnnnnnnnnnnnnnnnnnnnnnnnnnnnnnnnnnnnnnnnnnnnnnnnnnnnnnnnnnnnnnnnnnnnnnnnnnnnnnnnnnnnnnnnnnnnnnnnnnnnnnnnnnnnnnnnnnnnnnnnnnnnnnnnnnnnnnnnnnnnnnnnnnnnnnnnnnnnnnnnnnnnnnnnnnnnnnnnnnnnnnnnnnnnnnnnnnnnnnnnnnnnnnnnnnnnnnnnnnnnnnnnnnnnnnnnnnnnnnnnnnnnnnnnnnnnnnnnnnnnnnnnnnnnnnnnnnnnnnnnnnnnnnnnnngggctcggtgtcttcttcgccacctataagaacaaccgccccggtgtgtcgttcccttacgtcatggcgatgatgggcgatgggcagacctcctatgaccaggcgcatgacggcaaggcgaacgagctagccggttgctctgtgagttgacattgattcgcggctgttttggatataccgctaactgttcacaggctcgtggtctccgcagcgccccagttcccacaaaggctcgtcttacctacttccaggacaagtccctgtccctggagctacagtacaagtccgaagacacatggaccgagtgcttcaatctttccgctgaggattctaacatcgccatcccctccgtcgcatacctgggcctctccgccgagaccggcgagctgagtgacaaccacgacatcatctccctcaaggccgagaacctatactcacttaaccgcgggaagaccacagaagaccggtccaagggccgtgtccgctcctcccccaagcctgttaaggagctcaaggagaagagtagctggacttggttcctcttcaagatcgtgctgttcttcggcgttgttgtcggtggttactttggctggacggtctaccggaccaagacccggtcatcgcgtttctaaatttacgttgtatggacatttggtaaagcacaggtcttaaaccttcttctgtgcggttcaagttggtctctgggtttgcccagtttttgcatatatagcccctttgaagctcttctttttactttcatctacgttcagctcgcactacagttcttgttatcttttctcttcatctttgaaatgaatcaaagtcacgatcattcataatttgctctgatatgcagcatgatgcttggggtatcaatagtattacaagtaataaaacaaaacgccgcccaatggagagacctccgtcgttacttctgccgttctctctcctcgttccacaagccatctacaatctggaagacctcagtaacgctgcgcatgacagtatcatcaatccctaacgcgccatagcgatgctgaatcttatcgggatgccagcgaatgcgctccgctttaagcgtaccaagcaggtccgccggcggcggagcatggcgcatgaactcctcaacagcttgaggtcgaacatcaaccctcttcccagagcgaacaggccagaagagcagattgcgcagcgacttaggagccgattcctccgcaaccttccgaatagtctcccatctctccaaatactcagcccagggtgcaccccactcagtctttgctctcttgcgctgcgctcctcgccgtagactctcgtccatagcacgttcaaactcctccctcccagactgcgcgttcctctgagcctcctccttccttttctgctgccgctcagcccgcagccgctcctgctcggctaacatgccctcccgtgtccgctcccacatccgtcgacgtacgtagtcaacatattcctcctccgtcatctgttctagctcgccctccggcccgcgttgtacgtccgggacacggtagttatggatgggctggccgtagacggattcccagtatgcggcaccttcgtcgtcgccgagagcgtcgaagagtgactcgcggaatgtgtccgctgttgagttgaaggagttttcgtatgtcgggtcggacttcttgtcctcgcgatggtgtcgcttggacggttcactgtctcgtgtccgtgatctgtgacggtgtttccgctttcggtgaggctgactcccatctttgaagcgaaatgcccgggtgtggcctgtccgggtatgttctttggggtcctcggtaggtttggtggctcgaggatgctctgcggggggagatgccccaggcccctcggtaggtgtggggtttgagttcattataaattgtattttagatggcggagtagctccaattggcagacctcattgtttgggagttgttgagtcaagtaaaacatcgggtgaatgtcaaaaagttgaaggagccaacctaatctggaaagcggagataacgtgtcttagtcatcttatctccacccccacatctacaagacctcatagaagacatcgcctccgtaagaaaggcattgaatgtataaaatctaaatttgggacacagcttctggacgatcatcgagtcttcatcttctgagggtttgagcctccatatggatattttaattgtaaaaatagtgtcattatttgaagaagagctaaagcagagctaagaagccaatatgtgtcggtagagctataagccttgaattctccagacctggcatgaaatcaaattcaaattatcaagtgagatctggttgtctttctctggtaaggagatcggttggtggccgaacagctcctcggtcctgacgatcaatggtggaatatcaacttgacacagccactgtaagaatgaattcaaaattagggtgacaaacgaccaaaacgacaccgaagaccaaggaagacttaccaattcacactgtttcgtgctctgacccagtgttagcaacgcttgttgcagtttcatcccccgtatatagtttatcttgaatggctgatccctcttgccttgtccaatcgtgcagagcgatatggaagcaatgaaatatacaggctgtctctgaagggaccaagttttttcggcagtttgtggtggactcaatgactaccagtgattgcattagtagtagcatagtagcgtagtcttgtcaccgcaaacctgatgtctggtctgattttgattagccagtttagcataccgaccatcatgtggtagtagtcatagtcgcctttttgtataacttcggctttggagatgatgaaaagagaacaagagcacttttataacgggggcatcgccttcatcgctgtaaatattcttttccttttgatgtagcgacatgcgctgatcggtatcagcgaatcatgcagatgtgacctgtcacactgatccttgcagcggttggggatcgcaacgatagcaacggtgttgatagcgttggccggacaaacatagtagagtaaacattaaaaacaagagtgcgggacaggtcgaagtagagaatgtaattcctacaacctaggacatcgggctaagctgggtatccatattcaagtcattcttttattcttttactattcttagcgtcaggcgctaatacccactcttggtctatcgggctatcgcgatatcaacccaccgcttctctgtccccgcgtctcaaaacaaacgcctcctctcgatcttacacttcatttacttaccttctggagattttcattcggatttacgccactgcacgtgcctactccctgaatctatgaattgagtggatatctttggtacctcagcttctatggaggggagcgcgaatgtcgcaatcgctttaccaacaacaggataacacatcctacatgcgattttcaactgtctctcactgctcagcataggaaattttctctcatttaattctaaacattacgatcttgtctttcccgtcactcgttatcttgctactccaacgttccttctgcgacaaaccccggcgcatttcatttgtttatcgcacacggtagcgcttgcccaacatcttctcgcattctgcacttgcattgcaagtgcaccaccattcgctatggcgactatcgcacctccctcccgnnnnnnnnnnnnnnnnnnnnnnnnnnnnnnnnnnnnnnnnnnnnnnnnnnnnnnnnnnnnnnnnnnnnnnnnnnnnnnnnnnnnnnnnnnnnnnnnnnnnnnnnnnnnnnnnnnnnnnnnnnnnnnnnnnnnnnnnnnnnnnnnnnnnnnnnnnnnnnnnnnnnnnnnnnnnnnnnnnnnnnnnnnnnnnnnnnnnnnnnnnnnnnnnnnnnnnnnnnnnnnnnnnnnnnnnnnnnnnnnnnnnnnnnnnnnnnnnnnnnnnnnnnnnnnnnnnnnnnnnnnnnnnnnnnnnnnnnnnnnnnnnnnnnnnnnnnnnnnnnnnnnnnnnnnnnnnnnnnnnnnnnnnnnnnnnnnnnnnnnnnnnnnnnnnnnnnnnnnnnnnnnnnnnnnnnnnnnnnnnnnnnnnnnnnnnnnnnnnnnnnnnnnnnnnnnnnnnnnnnnnnnnnnnnnnnnnnnnnnnnnnnnnnnnnnnnnnnnnnnnnnnnnnnnnnnnnnnnnnnnnnnnnnnnnnnnnnnnnnnnnnnnnnnnnnnnnnnnnnnnnnnnnnnnnnnnnnnnnnnnnnnnnnnnnnnnnnnnnnnnnnnnnnnnnnnnnnnnnnnnnnnnnnnnnnnnnnnnnnnnnnnnnnnnnnnnnnnnnnnnnnnnnnnnnnnnnnnnnnnnnnnnnnnnnnnnnnnnnnnnnnnnnnnnnnnnnnnnnnnnnnnnnnnnnnnnnnnnnnnnnnnnnnnnnnnnnnnnnnnnnnnnnnnnnnnnnnnnnnnnnnnnnnnnnnnnnnnnnnnnnnnnnnnnnnnnnnnnnnnnnnnnnnnnnnnnnnnnnnnnnnnnnnnnnnnnnnnnnnnnnnnnnnnnnnnnnnnnnnnnnnnnnnnnnnnnnnnnnnnnnnnnnnnnnnnnnnnnnnnnnnnnnnnnnnnnnnnnnnnnnnnnnnnnnnnnnnnnnnnnnnnnnnnnnnnnnnnnnnnnnnnnnnnnnnnnnnnnnnnnnnnnnnnnnnnnnnnnnnnnnnnnnnnnnnnnnnnnnnnnnnnnnnnnnnnnnnnnnnnnnnnnnnnnnnnnnnnnnnnnnnnnnnnnnnnnnnnnnnnnnnnnnnnnnnnnnnnnnnnnnnnnnnnnnnnnnnnnnnnnnnnnnnnnnnnnnnnnnnnnnnnnnnnnnnnnnnnnnnnnnnnnnnnnnnnnnnnnnnnnnnnnnnnnnnnnnnnnnnnnnnnnnnnnnnnnnnnnnnnnnnnnnnnnnnnnnnnnnnnnnnnnnnnnnnnnnnnnnnnnnnnnnnnnnnnnnnnnnnnnnnnnnnnnnnnnnnnnnnnnnnnnnnnnnnnnnnnnnnnnnnnnnnnnnnnnnnnnnnnnnnnnnnnnnnnnnnnnnnnnnnnnnnnnnnnnnnnnnnnnnnnnnnnnnnnnnnnnnnnnnnnnnnnnnnnnnnnnnnnnnnnnnnnnnnnnnnnnnnnnnnnnnnnnnnnnnnnnnnnnnnnnnnnnnnnnnnnnnnnnnnnnnnnnnnnnnnnnnnnnnnnnnnnnnnnnnnnnnnnnnnnnnnnnnnnnnnnnnnnnnnnnnnnnnnnnnnnnnnnnnnnnnnnnnnnnnnnnnnnnnnnnnnnnnnnnnnnnnnnnnnnnnnnnnnnnnnnnnnnnnnnnnnnnnnnnnnnnnnnnnnnnnnnnnnnnnnnnnnnnnnnnnnnnnnnnnnnnnnnnnnnnnnnnnnnnnnnnnnnnnnnnnnnnnnnnnnnnnnnnnnnnnnnnnnnnnnnnnnnnnnnnnnnnnnnnnnnnnnnnnnnnnnnnnnnnnnnnnnnnnnnnnnnnnnnnnnnnnnnnnnnnnnnnnnnnnnnnnnnnnnnnnnnnnnnnnnnnttctgatgctcacggtgacagtgaagaccacgtggatactggagactctgatgctcacggtgacagtgaagaccacgtggacactggagactctgatgcctgcaggcctaccgaggaccacgtcgaccctggacattctgatgctcacagtgacagtgaagaccacatggatactggagactctgatgctcacagtgacagtgaagaccatatggatactggagactctgatgcctatagtgataccgatatcgatgcagaccacctagaccccgactattctgagcattcggctactagggcccagccaaaacagaaatcatccagtgcatgcctctgcatcgagagcggctttacacctcacctcctttgtcttctccagggaaagcgacagcctagtagcgatatcctaaatgctgatcaagatcagtcccacgatgcgaatactacacgaatcaagccgcaactctttgagaaaattgctggccgtggtacacaatactgggcactttcccccgagaatttctgtcggacccatgctcgactcctcgccagtggaatcgggctccgcagtaagccgaataatcaaaaactcttcagccgcttacaatatatcttcgagcacctggagagccttgcccatatcaagagtgacccgacatgtgagcagtggaagtggttccaacaggcggctcggacccctagtcccactgctgcacatggggtctttaaatacccagtcgaaatgcctaagcctcgcatcgaccagtttgccgcgagtggcatgactgcagacgagatctatacccgggtaatcggtccccccccgacggctcccatcgcagacttatgggatgccgatggctcagtggtcattcctctcttccgctggcttggtgagaagaaactgcttggctgtacccatagcgccgatgtcccctgtgagcataccggcggtctctggtcgatgattgacttggaattcgacatgtatgagcaccaccgggcccagggcgagaatcccgccgaagaaagtgtgaccagcatgggatggctccggtgtatgtggcacggtctgatccagcagctcatccgccaggatcccgcatactatgccttttatgttctccttcgcccagatcatgcgtggcgcctgatctcggtcccgtggtactcgaaaagtaccagtgccggagcccagaccgcatttcggcacctcgatatcaatatcccccgctatctcagccggggtcggagtgctaacatcatacagggcgcggtcaccctgagcgacgaggacccggcgaattgtaccgagctcctccttggcatgcaccgccagggactcttgcagcagtggtgggaacgggtcgagcagcgcggcctctccaaccagaatgtcgttcatcgcatcgccagtgggatgtggactgccgctgatgaggccgattttggcctcacgtggcagcgccaggtctgtcaccgaggggatgcgcgcatctcgcgcccggagctcccctatggctcaaccggcccggccacccaagtccgacgtaccgtcctcccatggtttattggcattggcgaagaccatgagcagctggatactcacgatgccggtacgtggtctgctgtcgctgcgtcgcatcgcgatctcatccccgccgagagaggtacccctggatttactagcgtccaccgcggagctgtgccatatgcattcccgggcgcggtccacctccagggacttggtgcgatctccgatgcgctggttggacgccgccgatggaccaataccagtgtcatttccgagctggacgttctctttggggccgatacccatgcagccgaggtctttatccagcaatggcgccagcgagcagcgcaggcatttcttactactttccaagaggtccagagactagaggtcttatactatggagtaaactccttttttcgcctccggggactagtataattttatatggccgactaagaattcatataggcttagggtgtgatttacttctatatatatcgtagataaggaatttcagtagtaattcatttcttctataggattcatttctagtacagcttttaactttgatcattggcaccacgtaacaggattgatagaggcttattcggggcgctttacggaccgctcacaggggcgcaggtagcgattatcccacagtatcgcttaacggagctcccgctcgcttacaccaactgtttcagcgattgtacggcagaccaagcgccagtgttcgtgggagatggcagagttcgatatctgggttcggcgaagcatgtctgaagcaagctcgcggcttcccagaggcgggatcggtagacaaatggtcctgtcccacagtcgggatataagtgatattcttcggggctcacaggcatcttcgtccagtcagtatatatatatatatatatatatacagtgaagtcacaggagagtgtagagaaaaaagaaggaggtaatttatagggcaaagacataaaccgaaatgaaaagccacggtttgtcttgcgaaaaaagagagaaagagagaaagaaatgaggttgagaatcaatggtgcaggcttggttgtcttagaaactggtggtcgttgcacggtccttgtatgaaaactatgaaagagattcatattcaaaagtgccagctcgttgtctcttatttgcctggtcgattgccagccattatctcgtcgcgttatactacgtagtataaacttgaaaactcccctatagaatgggtggatgtttccttgggctcttctgaaaaaaagcgaattagagctgaagtaaaattacagttataattcgttaccgctgagaaaaggctgtgaaattctttaaaaaagaaatgtgagagaatgcaggtcgcttggttttagttgttatagttacttcgtccactaccatatggagtatcagtataactttgaaatggtctgtttaggaacaacgaggttgatcattgactgaagaataagccagtctgagtccatcaactacttccaatgttttatcacgtatggattgcacataacacaattctatatctgcggctaattcctcttatactctagctacaacatcaaataaggtgtcatatcttttgtaaaaaaatcccttggaagaccaccataccataaagaacattaagcaagagtaccaaaagagaataccaaaaagacatgacaaggactagtaaatgcttgtaggagtttgggttgagataaggttatgccaagagggcgacgagtgggactgggatcacgtggtattgagataccaagctaggatatgatacgataatctgggcagctctctaacatcccccttcttggtgaactacttagaaaagtcaagggcttgaaagcttgattgaatgttgaatgtgctttgttgaataaggtgaaagctgcaatatgtctgtacaacgccattccctaacccgaaatccaagccttccgcccaaaacgtaattccatgtccgaaagagcagaggatcaaatgcgataatgcgccatattcttcttgatctcatccacaatctccacagcttcattggtactccttgcctcaaagtcataacgcttctgctccgtggcatcattgccgcgcacaatcatcacgcggaagctcttggggtgccgtcggctgaccttagatccgatcacgtcactgaagctgatcgatcgggtcttaccgccggacgccgttttgcccgtatcaccgggcacgatatgcatataatcattctcaaacgtgaggatgcgatggttggatgctgtgaaagacatgggctgtttgcggaacacgtggtatcggcggtaataaccgcctaggtggtcttgcttctgagaagatgagggcaacatgcgctgcgcacccttcttggcctcctttttgctcttcttagaagttgtcgggtctgcggtgtccaccatcaaaggcgcatttggcgatgagctgcctggcgaggttccgagtgcgagaggcccgccgccgaagcgacggcgcaccagatcaaggtcggtgatgttgcccaatgcctccactgtgcggtcaagtggtgcaatcgtgttcgaccccatcacctttaagaggtagttgcccttatcctggccccatcttttacatacagaatccagaatctctgctatatagctatcggtagatgtgttgatggtcatgacatgtgcggaagcctccatgttgatgaaacgaatcttcaatgtcttggatacaccaagtcggggagtcgcatgcgagataggtaccaccgggcgatcggcaggggtaagagtgctgtggttgagtgcagacgagaatggctggcctaggatagggtttgttcggcctggtgtggcctgagggctctttttctgtgcagtggattgcgcccctggtactgcaagattagccggctgatctgcctcttccaacccaatgcttgaactaaattggggatgtagccgttcattctcctcaaactcggagttcgatgcttcaaccagtgcgaattcatcatatggcttgccccttgaccgtcctcgggacttggcagattggttattgtttgacgtaaaatccgtcattggaagtgtccgcccaagcgctgggaagtcatactcgacttcgccatcatcgaccatccgtagcgtccatcggttcacggtcaagttctcgcgattaattggtggaccgcgaccgtcggccgcatatttccatagggcaagaccaatcgtctcagcaacggtcacttgtgcgggctgttctgcaagcttagattcgcgtgtaagtgacagatcgagcgggtcttcggggtcgcttgaaaaaggaacgtagatcttcaaatataatgagtcctcttgacctcgcccagagagcaccacgaatttatccactggattgcttggtgctcgcttccgcgacgtaagctggctggtcaataagctgaccggcttgaccatgctgataggtcgtggcgggggaagatcttgcaatacaggagccggattgcgatgcttgcgcggtgaattattctgcggccctgtgccagagggtaacttattcatcatagccatgggcgaggacaaattcaaaccgcccgccacgcctgccagcagcaaggagccagacccagccgtattgtcaaaatcagatgaaagtgcagaaccaacaaactcggcaccagagtcctcgtcctcctcgtggagttctccgagagctaggctctccgcgcctcgactgccagttcgctcgcgccgtctgcggggatactcgacgacctgatcactcgcggagaattgaacctgtccttgtttgtagcctctaagttcggtttcgttatccgtcgacagatcactgctcgtggttgtatctccacgggggcgtggtttcaattgactgaactgactcgcaacgttttgtgttgatgcagatgttaccatcacttctggccgttccctccggaccccagaacggattggagaggagtcggcgcgatctcgatggatgggcatcttgtcaaatttgatctgatcaatagcactgttgttgtcagatagggaagtagaataccacacaataattcaccaacctgctaacgtctccaacgttgtccccatcgtcgtcgctgtcatcactcagatcgctgctatcgtcgtcctctgcttgcgcttgtctctgaacctcttgttgcctttcccgtcgagttttcttctttccgcctcgtgcatgattccgccgcgcggtcatatccgtatggcttttgccggtcaccatgccaccatcatcctcgccgtcttccaggccgaggccttgcaaattgtggtgctgaggtttcgcatttcgttccgctagcctgtaatattcagatgaaacgtttgccgtggttggaatcggtggggagtaagtgcgcttcagggaggagctatgtgtgttcgggtacgcagcggcggttgaccagcccgccgcgcggaaacccggtggannnnnnnnnnnnnnnnnnnnnnnnnnnnnnnnnnnnnnnnnnnnnnnnnnnnnnnnnnnnnnnnnnnnnnnnnnnnnnnnnnnnnnnnnnnnnnnnnnnnnnnnnnnnnnnnnnnnnnnnnnnnnnnnnnnnnnnnnnnnnnnnnnnnnnnnnnnnnnnnnnnnnnnnnnnnnnnnnnnnnnnnnnnnnnnnnnnnnnnnnnnnnnnnnnnnnnnnnnnnnnnnnnnnntgtcgggggggggggggggggggccccggcccgccgcgcgaaagccaggtgtattcagcacggagtcattgacgttgataagtcggtccccgattccatctttgattgttgagagataagaggagcgtaattgccagatcgtaaagcttcactcgggttagtccttggagacccttccgcggcgatttgagggccagtctacgattccggacgcgacttactcttcattgtgaagaagagacattttccaggctctcacgaggacatacgtctgtaataacccaggggtatgctgcgcagtagcgaccgaggtctagatatctcacagcagctctagctaaaagcgcatgctcggggaataaagggagggaaagcgaatgagactagctcatacaggaccagcctggaaaaaacagataaaagagataaagagatcaggaaaggagagcaaggagggagagaaaggagagttgtatgtcggaagcaagatgagagggaacttcggtgttcgcattcatttccccgccaagggggccacactagtcaactacatcgatgtttacatctccgtacaggtacaacacttgacgaatcaattattatacacatggttatactctcagtcttgaggaatattgagaaatctgttggcggaacatatcatagtactatgctggactactctgcctcaatggctgacgatatgacaacaagcattgagattcaaatcgaacaagactaaactctttgaacatcatcaaaagtgtacctagaaagaaaacacgacactctctccaatacctgtgagtttatcagccgctgccaatgcatccttccactgatccagaccaaattggccagcaacatagcatccgtcctcttctttcaggcgaagattccccctctcgatcatcttgatcaatgcaagaacatcctttcgctcatacatccagtttcccttcaatgtgatattagaacgtgtaacaaagacatttgggatctcaagctcttcataggcacccatcagactcacccggcctccaggtctgagcgacataatgccggatttgagatggaaagatcctcgagccccaggaggagaaatgtcgaggaatacatccatcggaccgaatttgctgatgttgtaggcatcattcgtgcggttgcctgtccaggttaccgtggagattctttcgcaagaaccgttgaaagtgcatgataggatctgattgagacgcatgagcttagcatcatcgtgagaccaggctacaacttttgcacctgatattcagttagccaaactcctgattgtctggggatatctttggtagctaaagagagatattacccatagccaaagcaaccatgcatgcagcaacgccgtttggataagtggccggagaaatcaacacggtttcaccgggcttcacgtcaatgctactcagtccaccgaaaggcctgaggaatgtcgcaatagcacaaagttgttctggggtataattaaagccccaattagtcggatctcccatcaacttaccttcatccaatggatagcaattctcaagtggtgccctcatgaactcggcatatgagccatctgcaaacccgctataggccatgatttccttgatttgagagtcaaatccatgatacacggggttggaaaatcgaaccatctccgggttatctcttcctttcatgaccgagtcaaagaagatcagttgaccaaccttcagagtggttgcatcgtcaccgacctggctcacacgggcaattgcacttgagccgggaataatcgggatttcataaggagatctgaaatggttgtaaaaatcaaaacctagcttactaaaagagtggaggggcgttgccaggatacgcagaagaacacttccgggcagtagagacggcatagggacttgttcaacttggggttcggtaaatggagcaggccttagaacgagggcacgatgggtgctttgaaccaacggaagaagctttctgtgcgggatgattggacgtggagtgtctggagaatctgtagacagacagttcagtgtttatactcatgattggcgagaatacttgacgtacttgttgtgacattgtcagagtcactagattcagagacacgagtcatatttgcatgcaggaacaggtctgcacagaagaagagtcgagatagcaagagctgagataaaagaagtggaagggtttgaaggcattcacgaggggataggaatagcgggaaagcagcgagagaagaaaacaagtcctaagacacgtcaaaatgtaaacaactaaattggtgtactcagagacagcagattaaaatgcaccaacactattgaaacgcgtgctccttgacgaaacgataatatgttacaaaaatgagaatctctcaagccttggccttggccctactcttacgagctttcttcggcttttcctcatcggcatcgacgtcaccatcggtcttcttcgtcttcttgcccttggccggtgccttctttttcttaggcaagctcacatacttgtccttcttcaggtcaagttcttcgtcctcatccttgatctcttcaacaacttcttcttcgtcggatgcttcaagggcatcttcaatatcaggcttgtccttcttccccaccttgggtgccacaacattgctggccttcatgaatggcatcgggtgcgaacgcgagttgtacagacgcgtgaaggtagctttcgtctgtgtctcaagtttgatcttagactcgtccattgggcctagtcctagttcaaccatggaatcaaagtcctctcgagtgagatagtattcatccatgagatcaatgaccgactcgacacagtccttgccttcgtccatcattcggcgtatcatcttctcctggagcaagggcatgtactgttgacggatctcgtcgcgattacctgtagtacgaagacgcatgtggccctgtatttccttgacgtatcgggagagtttgcctgaagaataaatcagttagagagtgtactatacagagaataggggaatgtccaaaacataccatgtttgctattgttgcccagccagctagtaaatgcaggccgcccatttaagtttccgtactggaagctggctggccgcacaaagctgaagatcgcatgagtgggcataagactccattgctgctgggtgccgtggatcatgcggtcgacgaggtcgccatcgctgatactcgaagcggcattgtccatcaattcaagcgctttcagtcgctgttcctcgccctgatatttgcccacaagagcaggtttagttctgaggtagttctcctgaagcatcaggtagctgaactcatgatcgttaaaataaagctcgatcttgtcattcagggtagcagtggaactcggggaaaacatctgggcgctgagaattttgctgacaatatcccacggcttgagaatgatattcttctcccacgactttgacatttgcttcccttcatcgtaattaagacccttttgatccagtcttgctgtggaaagcatgttgatgacctggcggatatcggcatgtgttccctcaatgaggccgtcgagtacaggaggcggaatcttaaggccttctcggaaacagatagtggacagtcttgcccgaatttgctcagcagtcgggcgtctgaatggcacgtcataggtgatgaagtcgaaaggtttcatctttggaagctttcgctcattgcagatgaggatgatcggaatcttggtcttcttgacaatggctgcgacagctcccacacctccgcgatcaccggcagacatgccatcaacctcgtccatgataagtacgagctttttcttttcactatcgacttgcttgccttgtccggcgaaatatccttgcaatgatgttgtatctagcacacccaaggtagagctctcgacaagcttcttacttctggtgtcactggcattggtctccacgatatcgaatccttccagcttcgccacgagatgggctgctgtagttttgccgattcctggaggaccgtgaataatgacggcacggtatatccccgagccgtctttgccgccttttttgaaatcggcctgggcattggtatgccagtcccgcaaccaggtctgaatcttttccacagcactcttattgccacagatcatactggtcgatgttggggcatacttcgtggtccagagatcaccagatattgcgggctgtgagcttggtggcgtctgagacccggtggccgaggtcttggatgcttgagccgcggccgtctttcgtttttgctcatctcgtttcttctcctctgcatcaatttcggccgccatagcacggaccttggcctcgtcggctttcactttctcggcatgcttttcggcagcctttccatccccgccgttggcagggagtcgtcgaatcaattcgaagagaccatcctcgttgatggtcttgatcttgtgcttcgcaattgtctcaagcttctttgggccggcatcagatccgagaactacatagttcgtcttagaactaggagcccccacgactttgccaccatacttcttcaccaattgcgcaccctcttcacgacccagggattccaaaataccggtgaaaacaaaggccaaaccagcaaggcagttttcttctccaacgggcatctccttagtcccagccattgccggttcccggctttgttgtgctccaaatttgaatttccttggctctccctcaggaggctctggggcgtcaatcgtaggaatgctgtcgaaaatatcttggagctctttgctctctggtttttcctcctttttggcctttttagggctagccttctgcttcttcgcagctgatgctgccgcggctttggttttcggagctgcctttttcgtttcctttttgggttcttggtagtcgtcttcatcctcgtcgatgagagcttccgatttgcgcttgcgaccaggtcgagccttcggggtaggaattttggggagatcttccatgaccacgtcatcctcgtcatcgcgagaaggttgcttcttctgtgccttcttcaatcctgcagtgactggccttacctcaagcatttcgaagtcactgccatcgtcattatcatcctcagccacataatcatcgtctcctttgccggcttttccatattcggttgcaaaaatgtcatcggcgccaagattttcatcctcaaggacctttgtgggtttctttgttgataccttagtggtggttcgtactttgttcgcaggttcttcggcagtcttcttgggtttgggattttcggccacaatcttggctttatcggactgaacttgctcagttggttttgtaggccgtggtttcttcttattggaggcgaaatagtcggaggaagttgtaggttcttctttagtctcttcgggctttctgtagaggaagctcatcagtcaaatggtatgagacatttcaatccagcgatggacatacgattgacttttggactttgctttgatagcgggcgctttggttggtgctacatcttcttcgtcactgtcatccacaatctttctgctgcctgttttcgcgttagactggtagtgcaggactatgggttatggagagcatacgtctctttcttgtggcagaggagtcctgcattgtcggatttgaggttagactataatttcaagcaatacgaagggcaccagtacacatataaagtaaccaggccctcctttcgtgagcaaggcaccagcttacctcttttttagctgcgggtttcgtagcggcgtcgttggagccttgactcgacttgccaccaaagaaattccggatgtccatactgagtcgcaattaatgacacggaatttggcacagaacagtaaatgaaagcgcggtgtatggccaatcgagctcttgccgcagcgtttgctagatcgcgaacgacgcgccacacttccggggacgtgactggctgacgtaaggcagcacttccttccattttaggactagcgtatataagctaagactacttactaactataagaatcaggaaaggactccaaggcctcattagcactccttacctcaaagtcataaacgcttcaggcatgagatgtttgtatatagtgtcattggtgccgagagatatatatcggatagcaccggctgtgcataacatatcaaactattacaggacaagacaagaggattaccagtcagacatattacatatccatagtttcaattatcgagttgcgcagcgcggactttctttagtatgattgagtgcatcttccatcaataaatagctatttggagctacaacgtactatgttagaatataattagactgaaattgaggcctggttttcaaggcataatttagcaagtatggataatgtcacgtgctctgtgtctttccactttgggactagtgtaaatcatcgaaaagtgccggagtaacgaagcctttcgcaacattggtatctctcgccgcctccctcctcacaatgggtccccagatcaagatgtttgctggaccgctttccgcctgcacacggccaactcgtatgagccatttaacccccataaaatccattcggccgaagactaacagtgcgacatagtgtcgggaccgctggccaccttttctctatcacgatgcttctctaccacctcgcccacccttgattggctgaccccgaaattccaagaaaaatccaaatcccccaagggtcgccctcacgttgctaccggcggatccacccgaggaacaacagtcgtgtggggagacttcggtctgcgcatgaaagaccacgaccgccgcatgcccgcatcggcgttgaagatcgccgaagagaccatcaagcgacggcttcgaggaatgaactataagctgtacaagcgtgtcagcgccaacgttggtgtgtacaccaagggtaacgagcagcgtatgggtaagggtaagggtaagttcgactactggactgtccgactgcccgtgagccgaatcgtctttgagttgaagggagatgtccacgagaagattgcccgcgaggctttcagattggcgggccacaaattgccaggtaggttatgcattttctacattactactactagtgcgaaagatgctcattcttattcattaggtctttgggagttcgttaacaaggatgacccgcctgtcgtcggtatcacaaagctcggaaacggagtcactctcgactccctcaagcgagctcgcagagacccgcccattggtaccaatgacctcgtttcacctccgcagagcacctcatccagctccgactctacacaataaactgccgcttcctgcatgataccgttttctcttttttcatcggtcatgtcttttgcttttgtcgtctttgccgactaagccccgacaccagagccaggcccatacccctgctgtctgcgggccttggacacggcatcgtcctcgtcacgtttcatatcttttgtacattatcatcagctgtttgcgtctctttaggagccgtcgaggcacgggctcctctgatggatcttttgtcttgatactaggagtttagacaaggaaaatatattcaggatttacctttaccggggtcagctaatgctcccattcctagcttctgtgcctgggcatcctcgtcgttgctggatgctggccctgggctatgtgtccctagatcagggctcgcttcgcttatagtgtgcttctggccaacttggatgaggtcagtcattgctatgcctagtgcactcagaattatctccaaggaagcgatataccccctagctgtccggtctgcttgggaggactcttagtgaattccctaatagactcatatctgcaccctgtatattagcgaatagcaattgcaagagatggtcttgattcggtccatactgagtgctctctccgcccggttccatatcaacaagtctggggtcggacattttggatgatattcgtatggaatagaggtacaatagtagaattgtattaggaaaatcagatgaatgctattccgatgttcccactgggtggtccagtttatgaatgacggggatgcgatgacgtatgttaagaggtcaactgacctacacaattcaggtttcttgatatcattgtataaaatagtatcgaatgtgctctatgtacttagaatcgaccattgctacaatacggctacagcttcgctgttgaaatatatagagctacgagttgggcacgtgtggttccagaaataaatagtcttggtgcattctttatactacaacatttagcaacattgcgcgttgaatcataatgggggatcaagcacaacatattcgaaaacgtatcatgaatcaaacccagacacaattcatagtttcctcagagaagttgattcaggaccaattcgaatactgggcgacacccccaacaccctactcgaccctggagagtatctaggatctttacgtctattcatctcaaaggcacagtgttctattcgcaatcatcgtctagacgtctaaactagttttctcgctgtggacgtataccctggaagtcacgcttacttcgtcctggacgttaacaatgtcgactatgtctatgagaccgctcataccgatacgagtcccattcacatctacgttcttcgcctatcgaagaggaaaatcagcatcaacaggcagcgacagctagacgctaccattgctaagagatttagagcgatgcacaatgggcatggggatgaccctctaccgttgcttgatgattttaatcggactgttgaatatcacagtccccgtggtcttcggcggtagatcttcaacgtgatcatctgagtttcctctatcggagtttgacccccatctgatttgatttttgttttctcaatggaagctgcaatgctgggggcgcctcagcccaaacccaaacgtgcaaccttgaagataaccatgagtgaactgtgcaatccctttgctcaagtgatacagactttagcgacgtcctgcgggtccagattccggagagtagacccccatcacgacaatccttgcgtaatttagatacagtgatatcaatctttgtaagcaataccgggagtccgtgacttgcagtattaaatgaaatgtgatataacgccagaatccttttcaaaaatgccttcacgcgcctggaaaaaagtgaaaagtaaattgcatacctggggatttcgaaaaaagtgcagttctgcataatagcagaccataacttccgagatcccatgctcaccgaaaaccaccttagtgtacaaatcgtcattcatccattgtcttggtttgttgacagtgagtaattagaaatccatgcccatcagatagctaaagtgctattagttatatgcctccattaaattatccaggggaagtatacctttcatagatgcgcatgaacttggccacgaaggcttcgagatggaagattattttctgtatcgaaatattcattagcttatattgatggcaatgctaaccatcaataacttacacttcccagcttgatgcggtgctcatagaacgcagaccacttgataacttctggtttcagagcatcgtcaactcgtgcaacaagcttgaatgtcaaggtctagcaccagcagttaatatctggagcatgttcattgaataggtgtatacacaccttcaaaatagttgttggggggatgcaatgggtcagaagatcataaagacgtgcgcggacttgcaacagccgagctggtgaacgctcagccataatctcatcagccgttagggcaacaagggcttcccagtccggaggcgggatgagggtcttgtctgtaaccttttcactacatttccaagaaaacgtaagcttctaaaatccaggccaatgggaaccgaagtagaaactcacttttgcgcataaatagactcaaacatgagcagcgcacgacgcagattgcgtccactctccttcgcaatcctcttgttcagcacctgagactcggtccatccttccttttttcctgcgagatggagcgcagagcaaatgtcagcttcagttggcgctgcaaccctgaccagcagggttcgagaccgaatcggtgcaatgatattggaggtactgttggccaggagaatcaatcgtagattgggactgtatttctccatggtacgtctgagagctgcctgggcatctcgtgtgagatgatcggcttcgttaatcacgacgaccttgaaccgctgcttcgcgccgagatccacctgttgcgtctgcgcgacctctttaagcaattcctgaacgactactcggtcatagtttccgacatctgcgggggtgatctcgagatggtacaccgatgagacaatattgaactctagctttcggttgctcgtcgtttggaagactctggcgtcgatcttgatcttctcgacaccggggccgtacagttcttttagtgttgcaatgacccgtgttttcttgccagcgccggagggtccatagactagtagatggggaaaatctccgctttgtgcctgttaggggtaccttatgttaaaattgtgtcctgttccgcagctcagactttcttaccagtgaccgcaggcgatcagagagctcggggtggtatgtgagagcatcgagggtgcgtggccgtagtttatccacaaggagagccattttgaaaactctgtaaagctgttgagatgaggaatcgaggtgcttgtggtttggatagaggatgcggacctgagaacgcgtccagacacgcgcctaattaatcactggtccgtgcacgctcccactataatcagcttcgaagaaatgatttcgacgtagatcgtacaattacatatgaataaatttaacgatatatacagctatatagttttctaggcatttggcagccttccgccaaactccgatatgtatagtacatgcaaatttgctttgagagatgagatgaatgttgaaaaagcccgacacaacaccacgcatgtttctttgttcactgttaatgtccaagcctatacaaaccaacacagttgaaatacagtaccccaatgcgcccttggtgtgagctttttatgatgcaattggcgtcagaacaccattgtcatcatatttagcttctgcgttgggttagatcaggccaagaaagcaacgagtagacaataaaacttactgaagaaggtgtatgacagggtgatagtatcaatgcccttcatattagggtcggtagcaaagtcgggatcgatgaagaagaagacaggcatatcaaccgactctcccgcattgagcttctgctcctcaaagcagaagcattgaatcttgctaaagtacggcgcaacctgacctggcgtgacgctgtatgttgcaactccaataatatcctgaggacccttattcgttgcggtatagaatgccagcgccgtctcgccgggcagcactcggacttcacgctgctggggagtgaacttccaagggaggacatccgataccgagccgttgaatgtaatgcgcaggcgacgagaatctgtcaccggcgtcacacgtgcagaggtatcaccgtcgccgattcggtgggtgagaatgggctgaccgccccaaccggtctgctggcaaatctgcaagtgggatcagaatgatattccgtttatgatgtactctagatcgagggagagcttgtcataccattttgtagagagggacagatccatatgcaagggcaaccgttccaaggatcatactgatggtatagtacctgatcgggggttttgttagcacatggattccctccggtccgggttaaatggcagctcacaatgtagagttattgcgtttttgtgattccggggtattgaaaggcgctgtagatgaattgcgttgttcatgaagcaggaaattcttcgagaaataccttcgctccacctcgaagacgctctttcggagatggattgatcgctgtggaattgttaccgtcagcgcagagcgccccagcgagggggttaatcgtgaaaacatggttctatgactttaatgggattggacgttgagtcgcatgagatgcagagtatccaacacgtgataattctgattcaacgccttatcgataaggccttaagcttcggagtcacgttacatttaaacggcgggcgacattgagacaaggttagaaattagaatgtatgtgtatcttaaattgattcttgatttgttcatgaagattaaccgaatcaagaattttaattagaaggttcgaccgcacccttccggctgccgaggctgcagagttggctttagcagcgactcattactggtatagaggcataaacattattcgccttattcgccttgtacaaaagatatcattaagttcgggaaatttgaaagcattcatatgtaatgatgcagagttcataaaaataatacagggtaatggcacccagaagttagacccgaagtataaaataaccaataactaatacaaccgtttgatggcatcgaagcatttcactggaagtctaattcaacacactcgacgtgatgcgaccaaacacccctcgtaccatgctaggtcgctcacggaggcaagtgataagaacagcagcgctaacagcaaatgcgatgcgctctcggtattgatactgggaaacacaacacgcgtcagcatctcgtgattgttttggaacatgccacaggttaattcgaagacattaagaaggagttggaggggatgtgggtgtaaccctgttgtgaacagatgatgcgagggtccgatacatacctttttctcatacaaccgtggcaaaaccgtggcggcagcccggggtgccacaaatagcgccaactcctgcctcttccgcgtcttttcaaccaatatactccagccgcacatgagacatcccgcaccgacacatagcccagagtcccacatcatcggagtgaccgtcttcgcgtcaaagaccttggggccgagtcgtgtccgagcgagacagacaccgtagtaaaataagctcacaaaagatgcgaggaaggcagatgagcgtgctgcatcagaaagggcccgacgaagggcatttgcagatttcatcctgcgcaggcggaaaataatctgtaggggtatataggttgcacaggcatatttgaaggttctggcaaatcgatacaatgcgtgtttttcacagctggggccacagcccatgtgaaccatttcgcaagggatcgggacaaattttgatgggtcaccccatacctctggccagttgtaatcattgcacatcgactggagaagaggtgcctggcctgtatcctttccatagacgaaaactcctcgtcgagcacggcgcaaggcttcaattaaacgtgagtcgacctgagcagcttccccgatccacttctcataggctctgggcagtctttcggggagataaaaccacgcccacatgaccacagccgcactcatggcaaagacagttgcgtcggcgaagccagggacaagggattcgacagtcgtccagcgattctgggctcggcggcgacgggaccagcgaccccatgcaacacatgcgagcgcatctacggctcttgtgaccatgtagatggtgaggtccattgtcctccctgctaactctgggcggtgatgttccagcgaattggccataagctgactggagtcttccccctgatctgtggagttccggatagttctaacatcttctactggcagacagatgcggttcttgttgagcagttgaaaactgaaccatccagatagaagagagatgatgaatctaattaagcggtccagcctttgtgagatccgaacgtcacgcttggacagacctgccgtgatcaatgcacacagacgatataatcctattggtagtagggttgagccaccgaccagggaagcacaagctgttgggaaactgttcagacgtaaaggactagccaagactttagctaactattcgaggtgaggtcagctatagcattccgtttgtacaatagactagaggcaagggtgacaagataagtcgcgataagagccccatactaggtaatactacgacgtacctcttgaagtttctgttgcgcagtccaatcgttattgcgcagtcggcggacataagacaacaatttcggggtgacagaagataggtacccgagtgcatatgcgcgaaggaggctacagtcgtaatcagcaagggctcttcagatcacacagttgcaccaagccacaagggtaacagatcgcatggactcacggcttgaatatccggacgttgtcccttccatggcgtctccggagtgcaggttccatgctgccggaaaccttcatgtcatgatccgtcgggaggtgtcaacatcacagtcccccggactaatcggcgacgaggggtcagccagctgtaaactctggtgggattcacaagaatctcctcgccaattagggaatgaggtataagagctcaatgggttttatccgcgggtgacctacaattgcacctcccgaaaattgggtagtattctccaacagggggaaattgacacctacacgaccgttttctgaactatggatcaagtgaactccgtgtaatgagcctgttagagacttggtggttgtacctcggtccgtacccaggtgggaactccagaaaagcccccgcaaacaagatccaaaatcgggggagggacctgtttcaagagaagacagagggcgatcatccgaagcaatgagccttttccctttcggagcagattagtcggtattgcggggctaaacaaggcgaatgatctaactccaaccccataataagaggatgatctcaggagaacaattcccaaacaaggagatgaaccgcactgacccaatgatccttgtcaataagaacgagagaaaggaatatataagagaaagggcaaattgtattcgaatgtacaccagaaaacagctggaagagagggtatctgcagtgtactttgcgttgacaagtcggtgcttctctcgcagggccctcgggaagggttctccgggagtcaacagctctccccaggaacgtatcaaataccgatggtaccatataagccacagcggaaccgccgtaatttatgtactgttacgtcacgcgctcaaatttttgcatgtgatcaggccgattgcttttgatgcgaaactctccacgtattcttctataggacgcatctctcttgctttcgggcactctcttgatcttcttcttttgctttctttcttcgcactttcttctggtcttcttgttcctatccccattgcgctgaaccatctccttatcgagtcgcattatcagccctagagaactcccgtggccttgatctacccccgcgttcctcttttgtggagtcaaaccttggctatcatctcgagcgcatacaatttttcactccattccaaggcatgacagtgtcgccttggtccgcgctactctttccatcagagtagcaaccgttttcttgacaccctgtgaatattgaaccgcttttcactatgaatggacatggcactcaagttcggactgggcgcacgtctcccccggctgctccctttggatgtgagtcgctccgggcattatttgtaccgtccactctttaacccgattccagactcgtttctctcccccatggacacaccctttgaacaggcacctgctctacccccgggaccttctcttcttgacgataacgaatccaatatgcttgataacttctttactaccatgaacgcaaaccactttacgaatgatttctggatgcgacaagaacataaatccgggacacccaactttgactggtcaggtgagctgccgcccaacttcgaaggatcaaccacatccctatcgcagccctcatttcagcagcatgggctagggaaagcagccgggggaatcataacagacaatcctacaagctcggatatattcgccgcagcttccatgctctaccacagtggtctgaacggatcggagttaggatccacgttagcacaacaggctttcgcgggacagtctctccccacccatgggatacaacgaaaaattaattcacatactggcagtgtcgcacagggttcagcttcatctccaccccgggctggtgtcccggttggatatcatacctcggagatgttttttgacgtccgtgaccccattcctgcggaccaacatccatcaagaaaggcccgcagtttgcgatggggctcagatgccagttttatggaccagggctatcttcgcccccctgatcagcctgacgaggaacagcggacaagtgacctgctcgatcatctcgggtgctttgaaccacaaagcagtgcagcaaacacacgagcacctagtccagagcgcatggttggggctcctcctcaaggtgccgttttccgaagtggagctgtcctggacgagagcttacatccccgaaaacggccaagaaccgccctgaaatatgagggtgacgaagactccgatgaggatgatgcacgacctcactcaagaaagtctagaggatctatcagccaaggccgacgagcatcaacggacatgtctcgaaaagcccgagtacagccagggtccaaaactgcgcgagagaatctcactgaagagcaaaaacggaccaaccatatcctttcggagcagaaacgtcgaaatcttattcgccaaggcttcgaagacttgtgtacactggtccctgcgcttagaggtggcggattcagcaaaagcgcaatgctcactggagctgctgactggcttgaagaccttctccgggggaatgacatacttcaaagccaactgcgcgaattgaagggcatgaatggcttagtgatgccgcgttgataccctctgtcgcacgaccacaacgttaatatatgatctcatggatagccctgcctcttttcttcgcggggattgcaagcgtttcagcgggacagttttgtgtatgcatgtcggcgagttggcatttcatctttgcaaatcccggcaacaagataccatttttcttttctctgcatactctttcttcgtctttttttcccctataaccgctgtaggtgatacaagtcatctttcggctggtcctcggcaaatatcgataccctagtgcataattcgaaaagcctgtattgaacatagtttgagtaaagacattatttctttccaaatagttttgccaatataccaagacatagctttccgcatagcacataaatacgcacgtttggtcaagctgagacatttcagcgacaattttggattatttcagttttcatcggttttcaatttgaaaccttagtacggacgaatatgctaataaaggccaagactaccaagaccctgtgggttggcatgctatctactccgtacttccgtagtatctccatgttttgtccccaccgctctgtattgcccgcatgtgaagacgcgtcaacatccttagttttgtacctcgacctaacaccctcaactcactatgcctccaaagcgaaaacacacgggcgacgatgccccgcaggaggacgactccaagggctacgcctatctcaaaccgcacatccgccgcgtcccagagaaaaccatcaagtcgaaatgggcccctctaccggaacccgtccagggaaaggtcatggacatgttccactccctcgagcgaccggtgataatgcggaatcaaaatgagcgcaagcgaatcgaggcgcagggcgccgtgcaagcggtcgtgcgaaagtagggcgccgtgcccagtctggtagcttccacagagctaccagtgtcttgaaggacgatgatactaaccgtataccgcgtgttgtttagtctaggcaaaagactcccgcgaatgccgtttccgcccataacaaaggactccaacttcgactacgaatctgccctgaatgagcacgtatgcgaccccctgcgattgtcgacagcaagtccatactgattacattcttagcgctcactcgaggcccacttggctacgatgaatgatagcgtcgatctactaaaagctgagattgccaaagaagaagcgctccttgctagggaaacaaaatcgctccaggaaatggacaagaatgcgaaacgggccgaggctgaaaggaaacgacagactaagaatgtatgcagcagattatctcgcttcaaaatggactggctaatgttttacgaccgtaggaacaccccgtgctccgacagttggatgcacttcctcgaactgaggattctgggtcctctgagttcatgcttctcggcgcgaaagatagtcaagtgacactagatgaggtacggactgcttgtgaaccacgcgtgcttgccctgtcaacttaccattctatttgattttagttggagaccgaccccgaagtccaaggactcatgaagcaactacatggccatcttcaatccatggaaagcaatatagcgcccttcgcaggactcggggatgccatcactcgttcacaagctgccttggatctatactcgatccccaatgactgattattgctggacatcactgcacttgcaagctaccaatcccggcattttgatgcttcttatgattgacacatgaagggcctcggacccagggtatgcacatttattagaaactcaaaccaagtatcgcccaagcttggcgatcaggaatcacataggcaatcctggtcgcgtgcttaactccaatgcattcgctgaatagctgcatacggtggaaccgcacggtcgaacgcacctctgttcaacagatgataccgactgcaagggtaaaatatggatcaccctaaatcaagagaagggtaatgcagatatgttgcgcacctagtacaatctgaggagtcatgctctaagggtgatcagacaaccgaggctccaccgcatgaaaaggggaagaaactagatcaataaacacgagcctccaccttttacacaataccaatgtagtttcaatcgaaatccgatcaattgtaagcatagaaaacgcaattccgcagccgaggtggtctcgccccgacagtgacgtgtgcccaaacagccaaccccatgcggagcagttcggaggggtgactccgctttctccatccccaagaacttttcgacgtttaccaactactaccaactggtctgcaggcagccattccgctccggccctggtggttctcactgaactcttgcgcaatgtccgaaaagaatgcgccgctgggcacttccaatgcgacaaaatccagatctgatgcagggaaggatacgagcatcaagaatccgcaaacagctgcggccaaggccgaaacgaccggctcggggagtcactccagccccaagaagcgccggaaggtgaatcacggtaaggtgccgttgcgcagcatgcgacagggatctgggcgcgtccgatcctgttgcgcatcaccacaagaacattttcgctaacgcaattccagcctgtgtatattgtcgccgctcggtaagttaacttcttgggaatgttattatacttggttactatatgcgatacgccatgacatcaatgctagcgcatatctattcaaggaactggctttgctaacggggggttttgctcgcgtgggacagcatatgacctgcgactcggtacgacacctctgtctccctttccgcgttcgcgacccgtcacgtctgaaactttgatcgcaaacctgcggagaataatttgcaccagctgacctgtttaattctgaaggaacggccctgcacacgctgtataaagcgaaacatcggtcacctgtgtcatgacgagccgagggaaactgcgaaacgaggacgtggcgaacacgaacattctgctgcagacgacgagggctcgtctaacaatgaattgggctccgttcaaggcatgcctacgagtgtcgacatagccgatgctgctggtcagcaatcattccctgataccacgatcggaattgcaccctcagttgtgaatccgccttcaacggtgccgcctgggaatctttctgcgtctagtcagtcactcgaggctacctctcagcgtgagttcgcaacaaaacctgttttgccgccggactcagctaacgtggtacgatagtcatgccatacaacgattgggtaggtggtcagaatcagttccaggacatgcattctctccacccttcctacatgtttaatgcacacgaagtgaccaacgagtacaatctgctcggcgatttcctcagtaacagtctcttagacgacggggcaatgttccaaaatcaagatatgcagggaatctacaacgattcgtcgttgatgaactcgatgaatggtatgccagcaccgaacgggttgcctcctccaacacaacttccgccgccagcacagagccaagcactgccaggagactcgattcaacgctcaacctccgcgacgggtaatgacaaagcccgggaaacgtactacatgaccgccgccgacccggcaggaactgacccaccagaggagcggatgaacaagcttctcaaagcgaaatatgatgccggactactgaaaccattcaattacgttaagggatatgcacggttgaaccagtacatggaaaagaacatgcaacaaatatctcgacaaaagattctgcggcagctcgacaagttccggccgaagttccgagaacgcatgcagagcttgactgatatcgaactgattctggtggagatgtggttcgagcgcagtcttatggagtatgaccgagtctttgccagtatggctatcccagcctgctgctggcgtcgaacgggcgagatcttccgagggaataatgaaatggcacagttgattgatgtcccggttgagggtcttcgagatgtaagtttcaagactggagactcgccacgtcatattacacccaactcacatgtttactctctgtagggcaaacttgctatccacgagatcattgtcgaagaccagctggtcagttattgggaaaagttcggcgccattgccttcgacaatactcaaaaggctatgctcactagttgcacgctgaagagccctaaccccaactcaaggagtgacggtataacttgctgcttttcgtttacgatcagacgagacaatcacaacatgtacgtgttcattgctcaccactgtccactagatactgacatgccggaactaacactgtgcagcccgtctctcatcgttgggaacttcctccccatcgatagatagtacttttcggtagactgttatttattccatgacacacaaggacttctcttttggtatcatcgtttgatttagtgattccccaagttctggctgtgctcctcacagaaaaatgtatagtgcttgattttatgtgtataacatcaaacagtatgttttgagtcaaatcatatatacatacgaagtaacagggtctggtgctctgagtagtgtaaatgttctgtttgcaatggtcaagggacgacacgagcactttgggtttgactcgtcgtctctttcgtccctccacgctcttccaactccaaacaatcttccctctcactttcactttctttcttcctcttctcccaacctcttcgtaaccttcattatccccttttatctttcttttcatcttttctcccattggctcccaatccccaagtcttctctccatggcgcaaccgtctagactacacccggctctagctggtacgagccacacatcatgtccccgctatgcgcagcagctgacccccatattcttctatctaggtcatgctcacactttgcatatagccttatctacagtcggaacctcgagtcctctccttcctcccaatgccatttccagactggatagatggctcaagcgtaacccgtttgttgtcatggcaaatacatcgagtcgccagcagctggatatggttggaacattactctggaatgactgcacccatctgatcagcttgcgtggtcaaaatccggaggatatgctgattctcggcaaagtgagggctttcgcgtttgttgtgttgaacatggctgtcatgcctgacctcctaggtttttaatggcctctaatatatgttgaagtgaccttatctaacctcttacaggagacctccgggctctcgatctggccgtcaaggctgcgcgtatttgcattggtataccatcttacatctcacttgatgacttgatcaggtctaacgacaagaacagtgaaccagcaaagcgaaattgcggtaaatatcttgtcagtggcagccacgaggttgtcaaacattcagcctgctcatctcgggcttgacgctgcgattaaccgcactatcaccacccaatacttgttgctccgtatgcgactggtgagttgcattgcttgaacactgctttgtgtgtcaacaccagaattgacattatttcaggcctggttgcatgaacgagcagatatcgccgagcatttttatggcaaactccctgtcttgcataggtcgcatgatgaagagtggattttcgagacttgctttatcattggtgactctgcactcgcacggcgcctgcctgacatcgctatcacatggctgcagagagcgagcgatcacttgcagtccttacacatgatgattaagtttccatattattatgattgggacttggttattcgacattctcttggtgggtgggttgatctagttgatgacccggactaacatgctgcagttgtggcttgttcacaagtcaaaatccctctggcaaccgccatctacgattttgaaatgagctacttgagagaagtacgtttgtggtgaatgtggtagacttgaagctgacctttttagaattacccatttcaccctgctgtgatcctttttgatctatctatgggacatggcaatcctagtaatgacggggcactacaaggtaagactgatctttatcttgaatggaattgaattaacaatattgttgtagccctagagaggctggttgatggcatgacccttacagatatgaacatgccgatgtgagttatcccaattatttactgtaatttttgataaatgttaactgttgatccagaattttccaatatgcccgatctctgggtcatatagggtaccttgatacacctatcggtgagagactttgctgacagttctttagtggttcggatgacggaatggaagcacttcgaaggctgctcatgcgccctctgccagcaggagaatggacagagaaatgctttgttgcttttcttctacttttgagcagatcggacttgtctgattctacgcgtattcaggccctccaggatgtgattgactcactagagcgacgtggatatccatcttttagcagtagggcatctcacgccacattgattgtaaggcatactcaaactctcatcatcttcaattcaaggagctgactattatatacagtgcatctggaaaatgactgctggtgcaatttcccggaatgaccgctggagtgcaaggctatggcttcagttgtgcagtcagccaaagatcttccaacgctgctccctgcccatccagattgtgatacaaaagttagtggaacaagaattgagatttaactagcactgtgagctgacatatttcaggaagctggttgcttattacatagaggctggacagcttgccgacgctcgttggttaatcgatcggggtatagtccaaagccaggaagattgccaaaggatgtacttgtcttacaagttgacattgctggagggaaaaagcggtgctggtacgaatattctatcggaaaccaacgcttctggcctattctaactatatgcaagcgcatttctatctcggctttccttcgcatcccgtgccgcacaagcaactgagccttctttcgtgcgcaatggaagctcagagacaacacaaaccagaagaagtcctgaattgtcttgaaccatttatcaactgtttgacttcagatgacatttatcatcatgactttcccgccgccgaacatcacatgtgagaatgtttcatatttttgactcgctatgcaaggctaacttgcctactatgaataggtttgccattactcttctctccgaagagctatccaagggtggctttaaccagagacttggcaaatgcatcgagactgtactcgaaagtggtgcgttttcccccaggcaatagtaatttgtgatgctaatcgttcaatagccctgtcttatgccaaagaaaacagcctgtttgaaggtggcgatcgggaggtctcagtcactcaactggaatggctgtatttggcaacttacaacgttgctctgaaacttatcaactcttccggattcctgtcggctacgcatgccttagatcactccagagatgtctgtttcgaccaggcaaagtttttgcttggctatgttttactaacatcttttcagtttgcgctccagtatcgtcagattgaataccctgaggggggctccaaagcaccccggccgcatttgttttcggttatttaccttcgtctccttgttagcacacttagggcccgctgtgctgatccgactgcaaaggttagttacatcaattcttgtctacaacatattatcccccgaaaatgttgcaacgttatagtcccataatactaattgtctgcagaaaccgcactacgaggatgtatgcatttgttttcaacaactaggtgacttgcgtggttgggaagatggagaagagacagacgctggcgcaaattacaaagaagaaaagcactataatattgcccgatttttcaaccttgaggctaccatgcacctcaacaggtggcaggatgttgtcaggatatgtgcatccgatgacacgatccctgattcaaagttttacccacagatcatggatttgactctccgattgaacctaccacccacatgggcgatctggcttatcaaggttcgttgtttatttattaccgggagactacattctttgaaaaatactcacatctatacaatagcggatcgtgtcgaaactcaacgagctacgggacgatccccctaccacatggcaacacgagttccgagcctccctgcctcgttacctccactgtctattcatactagccattgaaccggacccctacgcaagcactgatagaagtgccaatcttggtttcaaaatggccgatgctgaagttgctgaagaagtgctcgataaaatcctcgcaatggcagacgaagaggcagccgttgcagaggaaagatacggtacacagcacagcctcaatgccatccaggtcgggtcggagatggattatatgtttacatatccagcgggggaattaatcaatgttgctaccatgtccttcaacaaggctattgacttttaccgtgctacgcgggaccaggattgtcagcgttgggcggaaaaagccattcgtgttgcccagcttgtgcctggtgctcagggcaaagcgctggtcaacgtacttcagatcagactgggaagcttgattggagtttgagttggtgttggtattggtgggctggtttgggctggggtgggtatgtggttcagataaattgtgacaaggtggaggattgtgtgtgtagtgtgctaggtacttgatatgaaattgaaaaactcaaactgattgttcttatgctttcccgatcaaaaagaaatatgaagagaaagaaaggattgatcttcgtggcgagatggcctatagagtataaatatgtgggtatcatcagaagggaaatgatctctgagaaatcagaaagtagaaagcaaaatcgcccaagccacaaaatccggtagatgatgcaaagatgcaatggaacaaaagggagaaatcaagagaatgctcaagtcaagatgtcagtaaataagaaagcaaaaagaaagaatcaaggaaaggcactatgaaagcgccacagcaattccacgaaagccataaaacaccaaaaatgcagtctgtaacttttccgaaagcagaataaagatccccaatgggataacccagttcattcctccccatgcgcatcgcaggaacggctccgcgaagcctgccgcacccccttggaccgcagcgacggggtagacggcatacgatgagggatacgaggcaacttgggcatggccgagtagctctgtttcggctcccgctccatgtccttaccgctactatctgtctctgtctcgccgctctcatcgctgctttgtctatgaccacccacaatgcggagtgtgagattgagctcgcgctcgagctccttttgcgcttgcatgcgctgactcgagccgttgagtttcttgcgatacactcgcagagtccggcacagctgctcggtggatgtgtctaagcttccgacctcgctgcgcggggttgttttcccgcggttgcggaagtcgatggatgtgcggcggttgctggttcttgcggtgtgtggtttccggggtgttggggtttttgattttgggcttattggggatggggaccgccggtgtcggtcttgctttgggcccggggttggggagaggcggtttggaggggaggatctttctgagacggcgtggttttttagtgatgatggtgctagggatagccgagacagcttgcggagtagagttggagagtgctcgcggataggtgttggtgttggaggattcgggctatccggtcgttgaaatccggcgagttcgctgcgggaaaggacttttcggagagggggccttgccgctgtcatttctttgacggggcattcgtcgtcctcccgtgtgtttgcaaggtctggggagacctgttgctggacagataggttccatatcatcacaatcccgtccataccggcactcaccactgtgcgcttggtttgggacccatcggacttatcacgctcctccagaagtaacacatcggttacaccttctgtatggccaaattcaccagtaaggagctggtctcgctctagatcatagacgcgaatagatttatcggtgctcgaaacacctataagaaccttcggagtctggcctgagatctcggaggcaactgtcaaagagcccaaaaccaccgcatcagctgtctccgaatcagatgccttgaaactgtgaagttgacggccggttgggatatcgaatttcgaaacacaacggtccatggtagaaaggtatagaatgttcgagtcgtcgggacagagtgtcatcgacacgggggaagccttttgagtgatgacccttgagatcagataggcaacagatgtgccacaagccacctcgcgtgtcgcgcgacctcttatgacaacggtgcgatctgcggagcacgaaagcaatttttcaccttcgttgatgaacagcaactgattaacagccccgacgtgatcgtccatggtttgaatcaactgcaactcgttgtcccgtgtctcgaatagttgcaccatccgatcacgcccagaactagctatcagccaggtctcgtccattttttggatggccacatccgtaatctctccgccatgggcgcgcgcctcgttgaggcaagtccagtcggcgttcgaaaagattctgcatcacagtcagctaaagaacattcggttcatatcctaattttgtacatacctcaacacaccaaacttgtcaccagagacaaaccagtccgcattctcagcggtcctcagaactttgagttcgtttgccgcatcgtcttcttttccgggaaattggtcgagatcgatattcttcgatcctcgacacttcccttgtgcatcccaaaagttcaccgtaccattgcgagaccacgtgaagaagtctgcagacaagttattgggaaaatccatgcgacaaataccgagaatcgggtcccgatgggccggcatggaagcctcgcctgcctcctgttcaccatcttcacctagagtgtcaatcgggtagacatgaatcgcgcgggttgattcaacagtaaccagatgagaactaagagaccccatgcaagtgatcgccggtgccttgcctttcttgtcaagtgcactcttttcaaggcgcgcaggagaagtcggcgtggatgttccacgtaagacttcaaatgataatcgctgcatttgccttcctcctccacctacccatatggactcttggtcaaagtccacggccaacgaagtgatgctgaacccaacttgctttaccgtgatcagcttctgagatccttcacgatcatcgaaaaagcaaactgcgcctgaatctgtgccgattacggcctcgttttgggatatactgctcacacaggtgaaagtattatcgcctagggtgcccagtagacaattcctgccgataagtgcttttggggcaaaactgggcgagagggcagctacctcgacattcaaacgtgacttggtcggtgaaacaggccgaatcgccgtgggaagacgccagaccttaacatgccgcaggccggtcctaaagaaaaacattagttgactgctaagtatccccatccgatcaaacgtacgtgaccaaagtatggccgacccagcacatatcattgataaatgaggtgcatttattcacagagtgtaacttggccgagccattcttgaggtttactgtccacataaagagaaatccatcgtttggattgccgagcgtggccaaatattgagagtctgggctaaacgccaggctgcgaacaccaaaggtatgctcgtttagaatggacagaggaacatcaggtaaggcatctctcgctgtcgaaaatatcaagactcgaggattatagccagtcttgacgtcgttagctgccgttgttgtggcaataatttatatctcgattcccacttacctctcccactgcaaggaatcttccattcgggctgattgaaacactcgtcactgctttgattctttccctcgaagaccatccacgtggactgccgatgtcgatgacttcgctcgacggagacccattgacattaagatgcggattcgaccggatatgggaaagggatcgtgatctggggtccgggctgcccgggggagtcgactggttgtaaaaagaagttgacgggttgacactcgtcgcggaggggcgggctcggaagaagcgttgtgttatgttgtcgttctcgtccaattctgcaagaaccgctgctgatccagcacatagcgcaaagcttctgctctgatcatggcatgaaaatccgtttggggttgtagttgttgtgccgatgacggtttggagggacaaggaggattgatggagggtcttgctgggggttcgtgtccctggtcggaggactggagagttcgaaggagtgattttcaaggatgcgctgggtccagcaagcttgctttttgcactggggtgagcggtggtggccatatcctcggggaggcggtcggcgcttcaatgtcctctaagagcgtgggatatttgcatgtcaagcaaagttcatcagacaggtttgaggatgccagtgaggctgtagtaggcgtccggaatttttatgtcggagagtcggtcaggagacagtgtggaggattggtagaattagtgggggcaagctaggatgaagctctgatcagctaagtccgatctctatccacacacacatctataactcaccaaaagagggtataggacgagaaaagtcaacaaacacgaagctcattccgcactaaagcagatcattccagtcagaggaatctgaaccttctggatgcccctggctccatggggttatttgggctttttgcttggcttctgattggcctcttggatttgaggaattaccggattctcacttttgagaccgagggacttccttcgatctgcggaaaagcgtgatatgaacggtgggtcgtgtacgcacaggtcgccgcactacccgcaccatcggctcagcgtgagctttaatgggagtatgctatactccgtacgttggatgtgattaaatcgcaagatcacatcagatcagatcagatcagacccaagggaggctcatgggaggttccactaccgaaggcccacagctccgattgctcgtccgatcgttgcattaatcttggaagtttcctcgattcagtctcacgtgcctggaatacgatctcgtgccccccgatgccctaatctcactggcacaattcgacctgtccattgcgatacatcggcagctccggtgttgaacttcttggcaatcttacatgcccatttctaccaatcaaatagatctgtaccccgtaagcacgaagatctctacacatgtgggatctaacccgtgacaatctccttcaccatcatccacgtagtagctctccccggaatttctcaggaagctccatgttgaaatgcaaccttcacttaagataaagcgagtagtcttggtaagctttggaaggtttcgggtagttatccccatatcatatgacttgctattatgtgtctttttggtgtctttcatattgctcttcgtagaattctgatactatcatgtggcttttgtgttctaaactaccacatagagtcatcatagagcatatacactggtaaagtatcaattaaatacaccgagagcgtatacatatcgtaggcaacttgatacaattgcagaggtaaaactataccgcactttcaaaatactacctggtaataccgcggtggcatacttagtttgtcgctcgtactcgcgatagtcgcaaactgagagatcgcaatagatggggaaaagaatgaagatcttattttatatcttgggttatttgttactacttgcatatcatcattcgtagcctttagtatggaatatagcagacatgaatagccccatggtcttatatgagagacgtacagcttatgttgccgagttatgtatttcttgctctctccccctgctactctctttaatgtctgatgtcaccatgtctgttcaattagacaatcgccagtcgattaatgactattgccgttcttatgcagaggatcaacttattggaggcacgaagtatggcaaccaggtcgttaaactaccgggttgtgacttggtggttaagttcggccgttaagtctccccctacgaggtaaagaatcagcgaaaagcgtaaaaaaaaaccagataccattatagtcccttaggttcattcattttttataggcaatgagggttggggctatatagtatcggatttgattccgggcaaaactattgatcctcttctgaactcttacattcttagactcgctgagtattttcactctattaccgccgatagcgctggtagcctatgtggtagcccgtcaattgacttactctggcccgagtcatacctagtaactggaggaatggttcaatagccggttttccccaaatatggcaaggctcaatttgatcttagcctattggtattttatcatttcaatatagcccctccaaagcttctctggttagatggtggccgtatttgtttattagactgggcatcagcagggttttatctgaggtcattggaatttgccagtctattctttcaagaatatcattccagccagacgcatctgaatgccgtcggttttggctctgggcgtgatgaagaagagctgctgctaccaggcattatacaacaatgaaaggtcctccttataagtcagcagaattgcttgtctctgtgaacaacgctgagccgaaaaccagtcgttcgagggacattttagaatggtcttcgcaccatcgataggctgattccacctttccttttccactactaccagcaccacaacttctgcgttgagaaagggacaaccttctaatggtaatacctaggtagtgtcccataggactagtcagattatcagatgagagctaaagcatgatcgatgttggtacaacttatgtcggaaaaaaggtaaagaacgatgtatatagttctggcgtttagcaatgcaattttcaatacaataatgcagctgctcgatcttctacaaattaatgtatagagttacaaagtcttatcaatagctattgacaataaattccaacaacgtgcacctgtatgtagttgctgagatacaaggaggtcttgctatgtattttggggctcgcttgttagttctcttatcgccacccggatattttctcttcgatgacctctggaacttccagatctcacattatctatcaactttgctctgctcgtcactcccttttttcattcatctacaacatattcccaagatggctaaatgtgctgcctcatcgaggctggccctgcctgccgttctgcgcaatgttttccgctctcagctcaccagcgcttcttcaagcccctatcgccgacctcttgcctccggtccttttttctctttgaatatccatcttcagagatccttccgttcaatttcgcgcttgcatgattctcagaatgatcaacaaacacccgcagcccctgaaaccacggctgtcgccgatgacaccctgccttctcaacacaaaaaaccaaagaaagattacgactcattcggcaagacaggtggttggaatactcataaacgccaccccaaagatcaacgaagggaccctgatagtaccggaagaaccgacagagagcgcagagctttccgcaacgagactcgcagggaggtgaaaaaagaacctcgcagggattggcaagacagagccgaaaaatcgaaacaattctccgagaacagaggaaagagaaagcccgagaactggcaagtgcaaaaagccgctctgaaagagaagttcgccggtggttggaatccacctaagaagctttcacctgatgccctcgatggcatccgtcatcttcacgcgaaggcacctgaacaatttacgactgctgtcctcgcagaggagtttgagatgtctccggaagctattcgccgaattttgaagagcaaatggcgcccatcggaggacgagatggagagtcggcgcaagcgatgggaaaatcggcatgatagaatctggagtcgtatggctgaacttggtcttcgcccttcgacaaaccgcacgcgaaacctttcggatttccatgtgctgtatgatgacaacaatcgcgagcgaagatagtcgtctgtgtacatgataccatgctatatatggggttttgagttgcgcttgtacaataaataatataacctagaggaaacaacatatctcttataactagtaattggttgcagtatggagtagggtgggtatcatggcatttagcccgtagttcggggtttagttcggggtggagctaggagcaaggatatcgtcgccacaactcccccggcaacacatcttcaactctccaaccagcatggttcattcgagttgacagaatgctaatggcggcatatttcaccaagcttcgacctaattacagctcaacgtgccggcaattccctccagaccttggccctcgaaccgcagcccacatgctgagacaaccgccatgccatccaacatccaagtcttcgtgaaatggaaggaccagactatctttgcaggagaggatgtagaatgtactataacattcaagaacgtggccgatactggcgccgatgccaataacgcgggtgaaggacaacattcacggaaggtctctcgagtcgcaaaccacacacccaagtcgaactcggaatctttcttcggatttaaatcgccccaggctctcttttccggtcggcgatcatactccatcagctcccaacggaagccttatcaccggacggcctcgtccctgagctcttcgttggtcggctcccatagctttcctccgaacagcggcccctctacaccgcgagaatggcaacaaggccacaaccataaacgatccgtctcaatcctctccattgatagcgaaggccagaccgatccgacaccttctccttacaatcgacgtcagccagtcaggggtcatgggcgctcggcgagtctccaggttctaccgcggaggaacaatagctacgaggattcttacaaaaaaggtagatgatggacagtgcaaaacatgcgaagggattttcaactaatgagtgtctcgtatcagcgagaactccctctcatatttctccgtttccattgacagaggctcccaacgagcatcccaatggcaatctgagagtcgatacctcccacttggggcgagccacccaacctggctctcgagcgacgagtccaacaggtgccatagagccattgcgtccaccttcccgacggccccaaccacctcccctcgattttaagtttccgcccgcggcttcagccgattcgactaacagtcgcaccgtgcgcaccccatcaccaaagtcggcgacaacgaacggtacatcatcaaccgggggaagacccactctcaaagatgtacagggtctatctggaccggcgcatcagcaactaactcggatcatatcagtcacaagcgtgaacgggagcaaccggagcagtggggagttctactcagtcagcgaccactccaccgagaccctcggatcagaatacacgaattattctctccagaatgggcgagctccctccatgcggcatgcgcggcatcattcaagcgtagttgcatctcctgccaaagcctccaacagccaggcgctgctgatgggctatgcgcaggttaacgcatcattcacggtcgatgggtcgttagtaaaccagtccgccttcgacgaagtcaagcgaaagggagttgttggtggccaaccgagttcaggcggacttcctggccgcccaacgccaacagccgaacgaccacgtaagagcggtgggttctggggctcactcagatggaacactatcgaggaatctatcaatggccttctttcaaataacgagttggacggattacgagaaatgcgtggtgttacatcgtcgagatcaattccgctcttgtccacctcgcagtcgctgctttttgttgacctccgactggcaccaggagaggaacagtcgtattccttctctttctcccttcccaaaggactcccggcgagtcataaaggaaaagcaatcaagatctcatataatttggtcattggaactcagcggcctagcgggcctaacgagccccaaaaggtcaaccgcatcaacatacccttccgtgtttttagcggcgtgaatggtaagttacattctttgcttttccttccatcccaatttctcacgtccttatagaaaagggagacattcttggccatgacttgatgtcaccatatgtacttctacgggatgaagcgaaggtccaaaaggttgggccagtgatgcctgtgtcaacgaagaaccaaagtattagcaagtctcaccattccgcggccgacttccttggttttgtggatgagatcttggagcaacgtgcgcgttccaacacgctgttcccacctggtgctacgccctcgagacgacctagcgtcgaaggattacctcagatgcttacttccaaggatgtcatcgatattgctatccttcgaagtaaccaggctgtgaactctcgccgcagccccaatcgctttgagattgcccgcgagggtaaacgtatcgcagtggtcgtcttgaaccgaccagttcatcgacttggagagaccattatcgccacaatggattttggagatgctacgattccatgctacgctgtgcgtgcctcgttagagacgtccgagaaagtcacccctactttggccatccggtcaagtgccagtattcaccgaaccacacggcgcatccatgcttctctgtttgagaacacactccatgccacccgagtggctttcagccctgctatccccatcacagcgacgccttcaattttgacgagcggtgtgaccctcgactgggagttacgattcgagtttgtgacatccagtgttcgaggcgatcaaggggccccgccatcaggcactcgcttactcgaggccttgtcatcggatgatcgcggcacggtgctgtctgccatggaacatctgaactgtgaatcattcgagattgctatcccgctgacggtttatggagagactgttcgagaacgactgcccgaggagaatgaaggctacccaatctagaactccagatgtacaccacaggtataccagatgaacatgtgcttgcctgctgtgcaggttatgcttgatcttattttgattaaatattccccttgtgccatcgagggagaaactcccagaaatatagaccccaccaggctctagactcccatgtataattgatactatatttgaatcgaaaataacgacagtgcgactgctaccaagtatgtaaatgtaaaatatatcttatagtctgtgacgtcgacgcggtaactggggcaacgcggtcagtcaaccgatcggatctgggcactttatcaactctggtggagctgaaacccgataacatctctctccttgcgcttctctcgaacatatcatccagaattattgtcaggtaggttcattggcattatctgcacgtcagcgcatctacacatctgatggcgtccctcaaatatcggacagcgactagtatctaacattggaatgcaggcacatcgcgatcagcgcaaaccccgccgaaatacacccctaccgaagggattacttttttttcctcgagcctgagagaatatggcttcgttcatcaccaccatgtctgtccccgctacccctcctgctgcccatttcatttcccctggggagcctgcctctcgctccccgcaagcactcccttccgtcatcagcccttccgtcgtgtaccacactactcgcacttcccatctccccctctcggagcctccatcttacctgtcgccggcagtgcgcgcactcaaacagggctgttttggactaacacctcccagcaatgcacgcacacgcgcccccttcaagccccgctcgtccgccaagggcacaaacagttatcagctacgacagtttgccgaggctacacttggaagtggtagcttgcgcaaggccgtgaagttgcccgaaggcgaagatcagaatgaatggctcgccgtgaatggtaagaaacatcttgcggagttgtactgggggtatctgctaacgttttggcggtctagtggtcgacttctacaaccagattaacctcctttatggctcaataactgagttctgctcaccgcagacatgtcccgagatgaaggctacagatgagtacggtgctttttcgacagctcgttgaccccagcttacacgtttggataggttcgagtacctctggcaagactcggagaatttcaagcggccaaccaagatgtccgccccggaatacatcgaacatttgatggcctgggttcagagcaacgtcgacaacgaacaaatgttccctagccgaatcggtgtcccattccccaagaccttccctagtcttctccgccagatcttcaagcgtctataccgtgtctacgcccacatctactgccaccattatccagtggtagtgcatctcggcctcgagcctcacctcaacaccagcttcaaacactatgttttgttcatcgacgagcacaagctggccagcgggaaggatttctggggaccgctgggtgatttggtcgatagcatgttacgcagcgactaaggattgaatcgggatattgggtagtgattgtgttttgcatctgatctccgcagtcagggatactggctgttctacggaaaggtgtcttaatggcgtttcgggtgcggcatgcattgcagtattttagcatgggcttttggcgtttggggcttgacctgacgcgaagaccgaagcgatgaatccatgtattttttttttctgatttggtaacaagaacgccttgatggttattgtaggttatcgcagatgaatctccttttcagtctcagcctcgggggaagcagatgacaaaaagagacaaccacattgttatccttcttcctgttaaatccactctccatactccgtaatagcctacgataacctacaatacccaatcattggtaggccaccagatgcactaattatagctaatatgccgctaatctgagatttgatcaatctcatgtttcctgctgcatagttgacccgaaactcgatggatctccaacatcactagcgtatggatctcgcaactcctttgagagtcgaagatatgcccagccgccaagcaattatacagacacgtgacttggtccttgtgtgcgtacacgtgaccacgggaacattcggcccggaggtctcaaccttgcatcctcgagaagcaagcactccgaacgtcgatatcacctcctcaatccaaacctctgcgtctctcctccctcctcgaggccattcctccagccaattgcacaatgatctccgctcgcttcgcccgcgctggcctgcgtgccacccagttctcggttcctcgcaccgccgccgttaacggaatcaggacctatgccaccccggcccaggatacccgcgcccccgtcgccctgttcggcgttgatggcacttacgcctctgctctggtatgcacctccattgcctcggtcttgtcgcgaccgtgtgcttcgccttttcgcgacgaacaccccgtctttccccgacccctcccacactcttcaaagcagtgttcagatcctcatcaaaacactgcaagcaaaaacccggaatgaattacccttctaaccatcctcgtgaatagtacaccgcttccgccaagtccgctgctctcgaccagactgcccgtgctatcgccaacctcggcgagaccctcaagggtgacaagaagctcgtcggcatcctcagctcccctatgctcaccgacgaggacaagaaggccatcgttgaggagctcttcaaggtcgccggtgctgacaaggccgacaaggccggtgtcgtcaagaacttcctccagactctctccgagcacaaccgtttcagctccctcgagggtgtctgcgagaagttcgctaccctgatgggcgcttaccacggcgagatcgacctccacatcaccagtgctcaggtacgtactccatgagctgtgtttcactcgcagaaaaaaaaataaggatataagctaaaagtttgtccgcaggagctcgatgccaagaccattaaccgtcttgagaaggccatttccaagtctcagttcagccagggcaagaagctcaaggttattaccaaggttcgttacaatcgatggaatttttttttgtagctatttactaactcattgaccaggtcaaccctgacatcgttggtggactcatcgttgagattgccgaccgcaccgtcgaccttagcgtttcttctaagatcgccaagatgaacaaggctctttccgatgctgtgtaaatgtaaattagcctcagtgtttgaggggatggttagattatagcatatcgtcccggatgaacggtagcgttcgtaggggaaaagggggattctaagattccactttctacctccattttgttttgttctcattacttcaattgcacagattcatctataaatgatgtcttatagatcgatgtttgcctgagtcctacaaggtacggtagacagcttgtctagtgggttgatcatttgactcaatctgtttaccttgatgtttgccgtccctttcgtatgtctggacccgaattgccggtctgatcgctggttaatctgcgcaatgacttttttatttctatatctgacttgtaggagtgcaagagcggtacgtgatacacccacaaggcgagcagctatgtcccttctatttgggagctcatgatatcattgacgtctacttcgctaccaaatgctctagagatcaagactatgctccgaaatgccatgtatgaatgggttggaaatgatagatagcaggagatgcaacacatgtgaaaaagggaagagtaagcacaaagaagatcgtgactgtcgtgtccagaagtaactaaataggtccagaagcaaccaaataggaaagcggccaggagagaagagaaagaagaaagacagatatcaaacgaggacgatcggaatgcaaaagttagacagcatccaaagccgaagagactgccccattctactaattatccctgtcaacctgcgtctcaaactcatcctcgtacgcagcaatcgaagcagagctgcgcactctctgcagctgactctccacatagtgattaacatgatcttgggcatcagcgtccgcagtactacccctgcgactgggcccacgactaggaccacaactctcaccatcatcatccaagacggtcgacgcagcgggtgtaacatcgccggagtagaagtcactccggttcccgatggagcgagtagtcgacgagcgacgaacagacggacggcccgagctgcgcggtcgtccagaacgggagaagatatcgtcgaagtagtgcgacgcggcggcgaagggcgaccgcggcgtctgcggtagacgacagttgataccggtgtcgtggatgatctttgcgatcagacctgtccatccgcactggtgcgatgtccccagcccgcggccgttgtcgccgtcgaagaactcgtggaaccagagattgtctttccagtgctcgtcgaaatcgaggaggtccgagccgccgtttacagcgcggcggccttcgtcgttgcgggcgaagaggtgctgcatgcggtgctgcagttcttctgctacgtggccgaggttcatgtagtcccctgaacccttgggacactcgacttttagggtgtctccgtagaacatgtggaagcggaggagggactcgacgaggaggaagttgacgcagagccagatcgggccacgccagttgctgttgccgccgaagagggaggagtcggagtcgccggggacgtagccgaccttgaaggtttggccgttgacgtccatggagtaggggtggtcttcgtggtacttggacatggagcggataccgtgcttggataggaactctgtttcgtcgagcattcgctccaggatcttgacgagacggtctttgctgacaagggccagtaggagtcggtcgtctttgccgcggcgcttcatgctggcgatgttgcgctcggctatgtctggtttgttctcgatgaaccagtccactcgccgcttgaacgaggggaatttattgatgagctcgggctctagggtgagaaccgcatacagcgggatcaaaccgacgagggacctaatgggtagctgctgggtccatggcccgccgtaggagatggcatcgtagtagaagctgtcatcttcgttccagagggactgcacggtgtcatcgcccgaacggaaggtcattgcatcactgatgagcaggaagtgctcgaaaaacttggatgcaatgtcttcgtaaatgcgacggtgcttagccagctccagggctatgttgagcatagtcagacagtagaaggccatccaaccagtactgtcagcttgctcaagcacaccaccagtgggcaacggctccgagcgattgaataggccgatgttatcgagtcccaaaaagccgccctcaaacacattcttgccaccggagtccttgcggttcacccaccaggtgaagttcagcagcagcttttggaacacacgttccaggaagtccagatcctgtcgtccgtacatcttccgctcaatcttgaacgtgcggaacacagcccatgcgtgtacgggagggttcacgtcgccgaagttccactcgtaggcaggcagctgaccgttcgggtgcatgtaccactcacgggtgagaagatcgagttgcttctttgcgaaatcgggatccatcatagccagtgggatacagtggaatgcagtatcccacgcagcgaagaatgggtactcccaagagtctggcatcgataagatgtcgtcgatgtacagatgacgccactgctcattgcgaatgccctttcggcccgccggaggaggaatttcacctgggtccccgttgctccattgatcccagatgaagttgtagtactgcttgcaccacatcattccggagaaagcttgacgctggatgttgcggagatcctcgctcatggggagagggttgaggtggtagtagaattcatccgcctcggtgcggcgctgttcaatcacatcgtccagaacttcttcgtcgacaaattcttcctttttacgggacactctgaaacgaacaacggcgcattcgccgggaggaactccctcgccgttgttgaaagcgtaccacgcagcgaacttggtaccttcgttgtctgggttgatagcgcctttctcttcgtcgacaatatgacgatggaatgcgtcttttacatagggggtggtgttctcggtaccccataagaacttgttgttagtctcgttctcggtgaacatcatctgaggcgtaatatcgtcatcgctagatccaactggaggtgatggcgcgaaggagacatatcgctcgccgattgcgctgtgcttcgatttggccaccatgggtccctctttcttgatagatggtttttcctttttcttctcgtcaccccagccccacgtgtttctaaaccagacatgggggacgatgtgtagatgagcaggctcggggccgcggttgtacgcgatgacacggaagagcaattcttcctcatcgtcggcctccttggcagtttcgatgaagatatcccagtagcgattgtcgtcgaagatgccagtatcaaggatctggtactccttctccaagcgtgagcgctttgcattctcatcgatgaggtcttggtaagggaactttctctgggggtatttgtagaggaatttcatgtaggagtgctatactccgggtcagcattctgagataacgggattgaatttaaagaagggtttaccgttggggtgttgtccacatggaaatgtgcctccttgacactctcaccatgattaccctgagggttcgacaaaccgaacaggcgttccttcaagaagtcgctgtgctctcgttagattccatgaccagacacggtcttcgaacggagtctagacttactcttcgccattccaaaacgcaaaggcaatattctgaatgccgtgcgtatctgatacaccagcaattccatcttcgccccagcggaaagttctcgatcttgcgtgatcgtgggtgaagtagctccaggcgtcaccgtcttcgctgtaatcctctctgactataccatggtaaagcggcattagcccgctgtttctcgatttggtatgatttgcagatctcacctgtggcccactgtctctccgcctataccaatagagcttttagcactgccaatctgtctgtttcaaagctatccaaggcctcgacttaccacatagggtccccagcgctgtcgaagtagttagcaggagtgttctcaagctagttccaagttagagagatgttaccttccaatacttggttctctcgcggtcttcctttaggcgcttctcttcctcggtaatgacctctttcccatcgattaagaccataatggcgattgcaaagcagtagccaagttaatgccaaacaaaaaaatatatgaaaatgaagacgaagagagggggggaagcaatcggccagaatggaggggagtcctgtcgaaggtgcagtctgtgccaacctgcggccctggagaaaatgacgtgaatcactgtcccaccggtccaccagtcgaggttcgggtggagaatcgggtcgcattagggaatgagggccgctgattggccgatatgactatgttcggttcgggcctggaaaggtgtgcaggtcatggacctcgcttttgcccgaaatagctacgagatcaattgactttggattagctatataaatagctataagctcttatgtctcgcttattctgcctttgcgtcgaatttgctacgttgtagtgctttacaacaaaactaccaaggtggaaaaagagtccatatctcaccccatataaggcggggaacaaatgaaagatcacaaatcatgatggtctggcgagaactgtgtcgatttggtgatacggagtggacggtgcccaaatatcggcccgattgttctagcgctgaacgttggcatcgggaatgtgttcttatcattttatagcgctgtagctgagacattcatgttacaactaagttgaggcgatatgtagcttgacatagcctggaataagcacagcatatgttataagcttggaagaaaaagaaaagaaatccagagtggattgcaatcaaatgaattgccaccaggcccactccctagatccacctcccatatctctaagacatatgtaccgagcacaacttgtatatccatctttaagcaggttgttttcatacggaactctcctaaggatcggtactatttctaatgcggcagagtctagaagaatcgaaacggttatagcaacctacacgctatagattctctggtgtaaagatgtagattatcctctagcaggctacacaggctacacaggctatctagaaaatggacctccgaagcgaaacccaaaaccataacaatcagggttgtctatattgtactgttgatgttcactatacctaacatccaaggaccttgcttcaaaaatcaagagagtaaccatagcgaagaatttaaatgaaacaatatattctcatgacatcctcgtcaaaccctaagttataggagcccggaaaggattagcttactgttgccaccatgcagagaatccgtaacaggtaaggaagcatataaaagccacaaaatcataccccgcagctctccaggagctgatagctccgtagcacatcaagtccgatcctcgaagtccgtgcctggtttctgcgcctcgaccagggaaacagggacaatgacggaatcgagtggatagttgggcgttcaatttctgactgcacgtctgtgattggacgccattggaagcccatcaacaagtcgcctgcttatcattcggctcgggcctggggttgcaggacaagtcccggaactatatctccagtgactccggagaggtacatcaccccagggtataaatatgcagatagtatctcgggtccgggaagtctgattgaaagaattcattttcaagcacaaaggcaaaaaaaaaaaaaaaaagacatgggtgaatcgcatcgccgtagcagtgcaaatgggggacgatcttgggaatattccaaggccatatccatacaataagggggtctctcaaaggatgctagaaaaaaaaaagataaaactaaaaacatcatccctataaaataaccacgccgactgggacatattgcgtctaccagacgcggcgcgagtccaatatcacggatcgtttgagatttccgccctgatgcgctcgtcccagccttaatctagtcccgactccaggaatccggtggcctatattttgaccgtccagatcttgataccgcagatgttcggaattcagttgtttctccgctgctcagactgctcagattcctcaaactgctcagacggttcagactgctccggctgctgctcgttgttggatccttcttgggaagctgttacacagtcagatcccgctacagcgcaaacccggccagctatatcaaaatcggcccgcaaaaaatcaagttgagcgctcaccagctgactggtcttgtccctggctggtttgggacgaagcgtggtcactccaggtagactgggactggaggcgcctctcggcctcgcggatgcgattctgcagctcttccaattcacgggtctggatcaacatctgttgtttccttggctttgaggttagcgccatgaaaatgagggtcgtgataacagcgagagtcgcgatatcgacgataaagggatgaacaagtgccactcacttctggctaatggtttgcgaaaggttgtcgacgtcagagtccagcatgaaggcgctgtccaaggccgtcgagaatgcttgcgccatggtcctgaggtcacggttaacactactatccgaagctccaacgacaatatagaggaacgaacgactgaggccgaaccttcggcttccactcgcgatccatgtcggacatcgtgtttgatgattcgacctccttggtttctgtgaacatagcgcgggtcccaacagctaaacggcgacagaggggtatgcgaccttgagacaggcgaggcaagagcaagttgcaggataaggtattaggcggtttaggtatcgtcgagaccaggaccgccaagaatcaagcacagatgaaaatgaatcgaggggtttgatgctgttcgaaaaacaaaacagggtcagtcctttatacttctcgacagataagccacaatccggtgggaaggtgaaagagataccagatatcaatagcagtcgcgatgcgatcgaagagtgataagcagagaactttggagccaggaagctaaaggggggaaaagaaggagagaagtgcgaaacgagagatgatcataagcccaccgactatgttactagtcgcggaaattggaggtcccatatatctccaccggcaaggagagagctcgtaagtgttacaactgtattacagggattctacgccattatgcgtcgtattttgatgatatataggggtttccaaggtttgtttcaggggttgactaactattttatacttccgtggtttacgtgtatggttcttctttcttagcattctgtctatagagagaaataggggttgatacagcatatgtatgtacttggttcacctttgaaacaggaaattggaaattaagaggcttcctttatagaaaaaggcaaactagcccctgacatgggtttcagggcaagggatcaggggactaggggactaggggattttcataccctcacttctacgggactcgaaagatataaggttgaaaacgtctatgctttcagatattagagaaaacattcagatctatagatttttagactaataacttatacacagcacgtcgtacgttgcataacttgcattctggcagattcctccctggcaactggtcacatgacctataccatacagtacagtagcatcgtgaatctcctcaatttcagtctccatttccatttccatcggcatttcaattctacaggggcatttcatctcgtcgcttcgtccatctgtaatccgacgtgttttatctgacccgttgtggtcgccgttgatttttttcccgctcaatttttcgcgcggatagattgaagggtcatgcgtattgcgtttctagcctgtcgcgttcgctatctctaaataccagccgacctagcccccaaagctcacagtgcagcgataccgagcactttccgtgaccaccctgatcgccgatcaccgaccaccgtggcccccatcctcaaagccttttcccccagtggccgaccggacgggcaatgggggatgcctcctctgtcggcatacacttcgtttgaatcccttctgtttttccagtccctagcgacttcggattcccgaccgacaagcttcggctcaatatcaaccttcttgcgaaacaaccagctcgtgcgcgagaatgtcgattttgatgccgatcgcctgaccccggaggcgctagaagacctctacgcgacattaatgcgcgacggatttagtcgtgatagtgcgccctcgctcaatggacgctccgcagatacctccagtccgcctagtccgaagaaacgcaagatctccagtccgcgatcagatggattggctgtcacccacaccacgctcgttccagagctagtggcacacctttacgacaaatacagggatctggtcaccaccgaaattagggacgatgagaaaaagtatacagaaatcagggctgagctggaacggctacagcaggaggacagcaaatcagccgctgcggcagctacagcattcacaccggtgcaaccggtgtctatcgaaggaaaggatgatgttctgaaggaagaggcgccgcgcccaaatgtacaggatcagacaggtcaacctcttgcgacgaccatcccgctcgaccaggagaaggcgaagcccgaaccacaacatatcccaacaaatgtgccctccacgacaaaggagcctccaacaatacaacccgcccctcttataaaccaatctcaagctccccttccccaagcgcaacccccgacacccaaaccgcaagacttagctgggcaagcatctcaaccgcagccgaccaccactgatcccataccaaaaccgtccatccaacctccacttgctccatctacccagaaaccccctccaaccacaccagccggtccgcgagtcacacctgcacacccgtcgcaaatcgctcctcgtgccaatcccgtcccacctgcaccaattgttacgggtaaggctggccctttgacgtcggcgtctcagcgaacccccgctcagccgagtttccagcagtggcagctagatccttctccccactcaccataccccgtcgtctccccaggtgctgctacacctcaagcagcccaggccattaccaagcgacctgtactaccactttccaccaacccgcctttgccagggtcacaagcccagactcccatccaacctcctgttccacaaacacccagtgccgtcccgtctacagctcacacacctgtcccaattggccgtccgcgtgtttcccaaacaccgagcgccacattcccatctttctctgaaacgcgcgcctctcatccacgcttgtcaattgacacacaaggctcctccacaccgtggaagagaactcctcgtccgaggatttcacgctctccaagctcaccgccacggccacggccggaggacgtcagtcccatcagcgaacgaggccaatcacctattgatgcgatggaaatgtcacctccgccgaagattaatctaggccaacgagctcaatctgcagaagataagaaaccacaacgcggccagtctgacatcaaacccgcccccataatcaagaccgagaaactaggtccaattcggaggacgcgcgccgtgagttcgggctcttctcggagtcgtgggcgatccatggcttcgcgcgatgggtctgctgcaccatcggaagagaccatgcgtgaaccacgagcgacgggccgccgaaagggtacagctgttaccgccgatgaagggacccccaaaccgcggacaaaacgtaaacgcggcgcaagtgaagcagtggaacttgagccccaccctgcggatatcccgagattcgacacgactcagtatgtcatggctacgcgcaacttccaccgaacagcggcaccgattatgaacgatgtagctacccacaagctcgcctccatatttgccaagccaattagcgagcgcgacgcccctggctaccatgatctcatctatcggccatgtgacctcaagtcaatcaaatctgccattcaccagggcagcaaggctgtcgctactgcaggagaagcagccagcactccagctggggatggagagtctcccgctcctggtggcacaccgtctaaaagcggcgtgctcatgttgcagaagcatgaggatttcataccgcccaagggggttgtgaactctgcacaactggagaaagagttgattcgcatgttcgccaacgcgatcatgttcaaccccattccgcaacgaggattcgggcccgcctttcccatgtctagtgaccgtggttcgcgagagagtactcaagtggccgattccggtgaaggcggtatcattcacgactcgctggagatgtttgaggatgttcagcaggctgttacccgatggcgggccgctgaacgcactgctgatgaattggctaataagaatgtcctctcccttcggcgtggaagtcccagtgaacccaacaccgatagtactgatgatgtgaaagggtaattgatttggaacgccatcttgtattatgaactttgtatttgattaagatcagtttatttgatttgtgaatgaatgccatgatgtctttcgtcggtgccttcgatagcccggcggttattaatactcctgctctacgtgtatattctgagctcgtgataataaaaggaaacatatcaacatgtatatcattgtcataacctttcagcagaggccagccctgctgccctgagtctataatggggtatatatattctattttccaacagccgacctctaagcctgccccggcctcgtccgcccaagcccctcctttgcatagaagtccatcggatacacgcctttattccccgcctcccagtcctggcgcacccccagcgcaacaagcgcctcatacggcgtcagtagcggccgcgtaaacgcatatccccaatcaatactcaaccgcggacaagcaatctgcacccagcactccacatccgccatagatgccagcttcccagggaagatttcactcagcagcaagttaacgattggaatgccgcggtcgcgcaagtgtcgctcgatcatcgccatcgtgtgcgggttaccctgtcgaccaagcgaaccgaggataatgccccacttgcgcgcggtcttggctgtggcgattgcgtcgcggcggatcgtgtgcatctcctcgtgctcgtagctctcgcgcgtcagggtccgcgagtacggatcgtaccggtaggctgggatggaggggttgtggatcatggcggattcgaggtggaagcggccgtcgccgaggtagaggattgcgtcgatttcggtgtcggagagttgtggtgatgtacagccgaggatctcgcctttggagagcggggtgatttgtggaattatgacgcggaaaccggcgcgctctagcacgggtttcaggccgtggagtgtcgcgttaaattggatcgtgcccactgttgcgatcgactggccgggcttgaagttgcgctctagtgttgcgaggaggtgggttgtgtcgatgctgatgtctacgaagatgtagagcgttttgatctgcgttacgtcgacggggatcaggcaactgtgcgcgtagtgtactagcaggtcacagcctagggcgcgggcagtgtagtcgtcgatgcaacaggcgccgtatgtgacgtcgcccatgatgagggtttcgattccagggcagaactgggttaggatgtcggagatggttgtcgcgaagatgaggagtccctctgggaattggagggctactcgcttggcgcctgatgtgcggactcgatggattgtcttggggatctcgaatgagtagttcttggggagaagctcaattgcttcttggatctcgggatcgttcagaatctctggtggcacttggttgagggtgcggggtgtgcgtctgggagcggctggagggagtgggaattagtatgggtagttcagttgagctatagttcggtatatacctgtttgcaccgctgtggactcgacatctttctgactggtcgtatctttctgggcttgggcatctgctgttcgtcgtccgacaaatctcttctttggttgccgcatttggcttgctgcttgtgagccatcctcagtggagggcgaaggaatgcttggctccatggtattcagctgtaatattcgtcaaaagatatcaagaattagaggtttcactgatcttgataacaaatgttggaatcgatatcatcccacttcttttttttctgccgactgactcagcaggaggtggggtgatgtactagtccggaagtggtaaagcgctctccgcattctcggctcccacagttccatgatcccaagctcacccttttacctgccatttctcttacaattctggtttctgtggtcgtacaagttggcctgaacttcgttatgacgataacccgccccaggttgagtcttttctctgccctacgatctccatactctgcacgccgcttctcgaccgagtcgcgcttaacatcggaccatgtccgcatcgtggaggttggcgctcgggatggactgcagaatgagaaaaaaacaatttcaatgcaaacaaagcttgagttaatcgagcgactggctaagacaggtgtcaccaccattgaagctggctcatttgtgcccgcaaaatgggtaccccaggtatgacctcagcggagcatcatcgtgccattccagacgataaaaaccgatttgcttacgttacgacagatggctagcacagctgagatttgtgagcacctccttacaaaaccgcctcaagcacaatctacaattgcatacaattatcttgtccccaacatcagaggactggagaacctggtcaagatcctggatgacacaggagtctccgcggacgcgactggggagacctcaaagtcagcgacgactacagaggtgtctctttttgctgcagcaacggaagctttctctaaagctaacaccaactgctccattaccgagtcactggagcgcatcaagccgattgtcgcattggcaaggagcaagaatatccgggtacgcggatatgtctctgttgcactaggatgcccatatgaaggccccgatgtggatcctgtcaaggtggctgatattaccgccaccctactggagatgggagcggatgaggtctcagtggcggacacaacgggtatgggcaccgctcctcggaccatggagctcatgcaagccctcaaggctgctggcatcgctaacacagacttggcgttgcacttccatgatacctatggacaggctttggtgaacacaatcgtcggcctggagcatggtgtccgcattttcgacagcagtgtggctgggcttggtggttgcccgtattctaagggcgcgacagggaatgtggcgacggaggaccttgtgcacacgattcacagcctgggaatgcataccggggtcagcttagatgagatgtcgaaaatcggaggttggattagtgaggagctgggccgagctaatggcagcagggctggaaaagcgactctcgcccgtctcgcaacagaaaaagcgtcactttgataagttatcctatagtctgtgcttgtcatcgtccggtgtatttattagtttccaatgggtttcacatatttgccaacaccacacgtaaatatgctttgcattgtcagtctagccattttgttatgtacactgtagatgtgatcaaccagaaccaacacccacccctccatctccgttacggagacattatatccctaggcaagaaacaccaacgccaacatgatgcaaatctctggtcaagtcactcagaaatcagtgcagcgaccaccatagctccaatcaccagctgcgccccaccgtagaggctcattcttgggtccgccaatttcgccagtcttcgggttcttctcgccctcaaactcaggctgcagtccctttggcgcatcggggtgaagctcgccacctctgccgtccgcctgaatctcggtctgtggagactggttgacctgaggtgtgctgaatgcgccagtcgaacgtttctggagctgttcaaagatctcctgttcctccttcgggagacgcgggggagccggggagtctgagaagggcatgggcttgtcgtcgccactctggcgcaggaatcgagttgtggagagtggccgaattgcaccgcgggctgcggcagccgagaggactgaacggcgaataacgagagtataaaccatcgtgtttgtatatctgtgtatgcaaggaatgatatatccaatgaggcaagtctggagttgcacgatgcacaaagcacagggagatctcgggagctcggggtttgttgactcactccaccgatgtgactaagattgccgaccccgatatcgccattttttatttctcccggcatgtcgctgatccgatcagacggttctcttacgattctcactctctttggccgtagattagttttggtttctcttctattcttataaatcaaaagtttgccatgtctgccctccgtgtggccgcgcgccgtctgcctcgcgcatccaaattcgtccctgctttcgagtcaccagtacagcgtcgattcgcgactacggccactgcccctcaaaatgtgaaatctcaggtcaaggtatgtgtgataaaaagtatccaggacatcgttcggatttggagctgacaatcgcatagaaggaatcaactctgcccaaccccgacccgtcgccggactcagtcacggcgtccttcattaatgagcgggctcctttcatggtcccgacttatgttcgcccggctcctatgatgatgaagggccagggttgctacttgtgggatatggagaaccgacgttatctggacttgacggcggggattgcagtgaactctcttggtcactgtgacccggagatcgcgaaaattatcgcggagcaggtgcgagatgattttatggactgtatagcgatcaattgcttacaaaaagaccccaattacaggctgaaactcttatccacgcttcgaacctctatcacaacccttggactggtgctctgagtcaattgttgattgaattgactcaaaagtccggtgctatgcgcgatgcctcgcaggtcttcatctccaactccggaaccgaggcgaacgaggccgccatcaagttcgctcgcaagaccggccgcactctggacccttcaggtgaaaagcacgagtttgtgtccttcaacaactcgttccacggccgtacaatgggcgccctctcggccacccccaaccctaagtatcagactccgttcgcacctatgcttcccggatttaagtacggagattataaccagatcgaccagctccagactcttatcactgataagacatgcggtgttatcgttgagcctatccaaggcgagggcggtgtcaacattgctactcctgagttccttgccgctctccgcaagcgctgtgacgagactggcgctgtcttgatcttcgacgagattcagtgcggtctgtcccgtaccggtactttctgggcccacgctcaccccactctcgccccatcctctggcgaggctgctcaccccgatatcctgactaccgccaaggctcttggtaacggtattcctatcggtgccactattgtctctggcaagacagttggtcagcacatcaagaccggtgaccacggcaccaccttcggtggtaacccattggcttgccgcgtcgctcaccacatcgtcgagcgtctggctgacccggagctccagaagtcggtccaggccaagtccgatctctttgtttcgggcttccaggccatacagaagaagttcccaggtgtgatctccgaggtccgcgggcgcggcctgattctgggtgttcagctcaccccagagtacatagctaaggctggtgatattatcaatgctgcccgtgagcgtggcatgttgatcattactgctggtaacggttgcatccgatttgttcccgccctgacgatcaccgaagaccagatccaggctggcctgaatattttcgagcaggctgtggattcggttgtggccaagtcataagtgtcttgtctgaatgccggttaagattttgtttttccttttataccatcttgtattgcgttggatatgacaggacatattttcatcatataaactagagcaataaaggaaaagtgtcgtgtgtccaaggatttatgtggagaggctagccacgtgtaaggcggaaggcggtggatcggttggagataaggagtcgtcgtcactcttcgcgcttgattcgacgtgcctccgtattcattcttgtctgtttctcctgaatattcaattagaatcaatatggactgaatatcttttgtcactttgttgtagctttttctaaacttcccaacgcaacaaccgaatgcctctccctgtgtccgatgaggatgccgcaacgcttccaccccaagagcaatcatctcccttctggaaacgtttgagcgcccgtcttagtggtgccttcagcggtgcagaccctcgagtctgtgttgctttctggctcttcggtgcgcaccctaaaccagcccagttgattagctcaactatgaactaacacccataccggcaggccttatcaacaatgtcctatatgtgatcatcctctccgcagctgtagatttagtcggacccgatgtacctaaaggcgtcgttctcctcgcagacgtgatcccgtcatttgcgaccaaactcgtcgccccatacttcatccacctggtcccatattcgatccgcgtcctcgtcttcgccttcctgtcaactgtgggcatgctggtcgtggctatgagcccaggctataccgatgggggaacgatatcgtccaagattgctggaatcatcctggctagcctttcttgcggtgctggggagctgagctttgtgggtctcacgcacttttatggcccgttcagcctggcggcgtgggggagtggcactggtgccgctgggctggtcggggctggtgcttatgccgttgcaacttcggcgctgggtttctccgttcatgtcacattgttggtttcggcctgcttaccagccatcatgggtttgagcttctttgtcgtgctacccaggtcccccctaagatctgctgaatccgacgctgatagttatcgcgccgttgagggtgggggcccggtggaggaagatgaagtggacgatggcgctggtggagaagacgaggggctcttgggagtgtcgcacaactcccccgcccacaagtccatccatgtcaatcaaggtggttcctggcaggaccagacacgcatgaatctacgtcgtatcaagggactgttcattcccttgtaagtatccgggtctttcgatagtcccaaatctaggctaacaggtatctagcatgatcccgatgctactggtatatatcgccgagtacgtgatcaaccaaggtgtggctccaactctgctatttcctctgcgtgaatcgcccttcgaccacttccgctcgttctaccccacctataatgccatataccaagttggcgtcttcatatcccgctcctcgaccccattcttccgcatccacaagttgtacctgccatcactcctgcaggtggtcaaccttgtgttgctaaccctccatgctatgtttgattttatccccactgtatggcttgtgtttatcattgttttctgggagggccttctcggtggtgtggtatatgtcaatacctttgctgagattgccgaacgtgtgcctaaggaggaccgtgaattctcattaggagctaccactgtcagcgactccggcggtatctgcattgcgggctttctcagtatgggatgggaggtctggttgtgcagttggcaggttagccacgggcgtgattattgccgacgaaagatgtagaatagagtggaggtctgtaatgcacatatatccacagataatttgtcataaaatgatataaaagcacgaaacataggactgaaaccaaccggcctgaatcggtcagctgatgtcgtcactggcatgtgaaagtgggactttgttgacatgtgattcagcttcccccagggcttttctccaatgacgaggttgcattacttggacttcgctgctgattgatggcattatgtctttgttcactgtggctgacttgtctaaaattgtctctttgtcactagtctttggttctgtgactgttattattctttaaactcgagccttgcgttcttattctggcttcacatagactacacatacacatacacactaccggctgaactgggtagactgactagactcagccctaaccttgagaaatgataggtatgcaacatgtatcccactgcaaccaaccagactaatcgatgttcagaccatgttttggggaggccttcgacccgcttccgcaagatccaagtatttgcagtggtttccttctggtcggtttacttattaaggtacagcatataaagtcaacatctgtctaataaatcccaaatgctgaacgtcgaacagagcagatagacatggcccgccgtttattcgatcgctctcagcccgcctcacaggaaagttgacagcatggcagacaacagtgatcatattcctctggctctacctcagccggaacttcgccaagattgtcgggctagaatgtcctgaaccattggcaaacatgtactcgcggtccttcttccgagcaacatggataaccactggtttggatgctgggttttggaccgcgatgaacataaagtcaaaatggctccgagatatagcctcactagtattcacagcctactacctaatcgctgctgaacaagccgatgagaaggttcgccgggtccgtgctaccctgacattggagcacctgcgcgtgtcttggaataaacccaccaccccttacctgtggtcattggcaaaactgctacggccgcgaatgactcagttcccggctcgggcaattcgaattcctcgcccggcacagtctgtgtacaccgacccagtgaatgcatggctttatttcgatggtccgttgagtgcgctccgagatcagagtctcattgtgctggatgtacctggtggtgggtttgtggctatgagtcccagaaactcagaggacaagctattgtcttgggcgggacggctcaaggttcccgttctgagtatcgattataagaaggcaccggaattcgcatacccgtatgcgctgcatgaatgctacgatgtctaccatagcatcattgccacgaacggtcgttgtgtgggtctgagtggtagggctcgtcctaggatccttgtcactggcgagagcgccggtggcaacctggcagtgggcatgaccttgatggtgttgcagtctgcgatggctcagggctggcgtggggatgatgtgcttccggccccggatggtgtggttttgggataccctgcgttgaatatgaaggttgagagctggatgagcgatgagcagatgtcattgatccaggagaagagcacccgtcagacaaaccgcggtgttctgcaacggaaacaggatgaataccgtaaactcacaccattcacatcgccaggtcgttcggtcgaagatctaactgctatctcaccaccggagaaggcaaaggataacaaagaagccaatgtggccactgaagcggccagagcactggaaaagaaactccaaaagagcgaggacctagccccgaagcctgccgttaaagcagaagatgaagtcaaaccaataaagaccagactagccgtctcgtccatgattacctatgttcacgaccgcattctcacacctgagatgacacgtgcgatgatcattctctatattggaccccaccatcgccctgacttcaacaccgatttcctcctgtctcccgtcctggctccagatgctttacttgcccgcttcccgaaaacatatatcatgaccggagagcgagatcctctagtcgatgacacggtgatatttgcaggcagactgcgtcaagcaaagctgcatcacttccgtgagcgccaggacctagggttggagagggccaatcgccccttcaacgagcgaaactacgtcgagatctccctgatccccggtatttcacacggcttcatgcagatggctggcttcttccccgacgcgtggaagtatatccatcgcagtgcggactggctagaaagcctgttccaaattatcaagactaacaacttcgaggcggatttacttgatcctgaccgggatgcgagtattttgaatgccagtacttccctcaaatcaaacgccccaaaaagcggacgtaaccaccgtcgcaagttcactggcgagtcttcgggtgatgacgacagaccattagagatgagcatgagcaagaccacgcttgctagtggcgaggatgcatttgcatcaaagcctgaacaccgcactcgtcggaggagatcacgttcctctttcgcttcctcgcggattacagggtttacatcgctaggagatgaccgcaacgccaaggaggatttcatcgctaagctccgatgcttggaaagagcgggtcgttctgaccctttcgatccggacgagacaaatagtgcacctgaaagtccgagtatagttcgtccgagaagacggagcatcgcttcccttgatagtgaagaggatttgctggatcgtcgcatgaacgggctcgctggtgggttgatggggatcggggaaggggcacagactcccgggctgtgagaggacagggctacgatttatgattaatatctgcgtttattttcggtttagagtgggatcaagtatgtgttggaaatatataccttctacctgaatcggaagatgtatatgtagaacttcctcagattgtgtcaccgcatatgaaggaatcagatttgtttaaactagagcaattagggtgttcattcgagggtctcacttgtgtgagtagtttcttagggcatgattccctatttccataacagcccctctcggtggaaaggtgagatggttacatatcatgatctcgacaagaaactgctgcgatatggggaatgtaagaaatccttttaattcaggagggtcaaagacgcaaattgattttccccaggggcccattttctttcaagaaggcagctcgatcttccagaaacgctttgtatggcggttttaggacagtcttctcttcatcctcccatacttgatatccgacttcgtcccacacttttgactactcttgcagcagctgttcctcggcccaagctttttaagagaggtcagtgttcttcacgctgaacagtgaacagtttcactgacagaagtagtatgaggaattttggacgaatgcatccaacgtgccaatcatgtggattggtcttccgttcagcatgatctaccttgcttatataactactgatacattcgatgccgaagtggaacatctatcgcttcagatcgacccttctcgacagaagatcgtccagtgcctagtgctaggcgagtacactagagcaggaccgtacgtcttgcagacagtcattaactacgtctatgtcgagttttgtcttcgaaccgacgtggatcaagatacctggtatctgctggccttggaggtaaacctggccatgcggatgggctaccatcgcgatcccagtcatttcccaggtatttacccctttcagggagaatgcgtcgccgactgtgggcgacagtgctaatgggtgatatacttgtgtcaaaccaaatgggtatgccacacatgatctccgactggaaatgtgacacaatggaaccgcgaaatttgaatgacacggactttgacgaacagtccaccgatcttcctccgtcacgtcccttgaccaaatacacgaattccataggacttatcgcacgacgacgtatccttgcagcactggggatagtggccgatctcacagatgcagttaaaccatgtagttatgcagaggtgatgcgcgtcgacggcgtactccaagatgcggcagccagtattcctcccctcttgcagatgaagtccatggccactagtgtgacagattctctgcaggtcatcatttcgcgtttgttcttgggtcatatgatctacaaggggcagattgtgcttcaccgccggtttctatatacaagtccggacgatgcggattatgattcgatgagctactcgcggaaagcctgcttggccgcttcgctgggtatgctgaatatctaacatgtgcttgatgaggaaacatgtccaggtggtcagctctataccatgagatttcgagtggcttccattatgaaccaccagttcctcactgctactatggtactatgttcaattcttcatcgtgggaagacgatacagcgggaacaagatatacgggcggcccttcatctttctaggttcatttggatgcgaaagagttccacttccaaagagacaaagaaagcggccgagactgttagttttgtgctcgctacggccggcgacggtcgtaaacctgacctcgcttttaaccaagatatttcccacggtgtacaagacaatgatcaaacgaacgctttccagggaagttgtgccaaaggcacaggccaaaattcagacgaggaactactatttccagacaacatgagtttatttgagcgtaagtctcagataccaaacctcctctcttgaccgatctgaccaaagctgtagccgaccattttgttatgactagctcccttgggatgttcacgtcgcccgcccagcaaaatcaacactttggggttaattccaacggaatagagagcccatttgaggagtggatggtgatgaatctgcctcagccgtgatggccatagccgagactacattttggatccgacaactgacttacgagttttttcataatagaattatatagagactttggaatgaagatttcaataccgtgcggctttgaattacttttgagatatcatattaattcatttttacacactttttgaaccctttctgggatagttagtcgctacctatagaatgggataaaaagaaacaacggcttttgatataaaatacttgcgtagaagtgattcctcaactggctttacactatgaagccagataggctttcagcttacaggaaatacacatgagatgactcaatggcggaactacagcatcacttcggagattgtttactatgtctatatatgtacctgtatgtaccggattttaggccacggtcgcgaatttcccgattggggtgccgccgcttttatgagggcgctcaggctcctgctcactgagtatttcacagcacaggtgatcactgtgagcacttagggtatgcttagtaatgtaaaaaaatactgtttagtacttctcaaatatcgctcagtgagtgctcagtgagtgctcagggtatgctcagtgagcactcgggtttgctcagtcagcgcacagacatgctcatcttgatggcctgaaaataaaggcataaaatgatcagatgaaatcacgtgataggtggatcattcatcagccatctattctgtgcaggctagcgcccagcaattaaaaatctttaagcattgaccgtcctttttgttgattgcgtcctgcattagggaatgtattcatcaatatgaccaccgtaaaatgatgacgtatgaagatccatagctaattcaggtaccctatcctgactatggctaggatgactttcacgaggtatctagcatctagtcgggctataaatacagcgaaacccccccccaaagacaatcgattattagaactcactatttcctttcatccccttcattctccttccagcgtttccagcgtccctatccaatcatagattatgggcatgaagcggcagacttgcgatttagcaaaggaacggcgtcgcgcgagacgcaaagaaactgggttccaaccggacgcctaccgagaggatgatgccatacgtggtaaacataaacatactgacgagtccaaagcccttcatctgcagtacatcgagctctggatcgagtgagtagcctcgcaatgcttttccctcatttacttgtttattgacttttcaggtttttgattgaaagcggaagagtaactgatggttatgagctagaaaagggaattccggcgcccaaaattactgaaatcaaagaatttattcggtagtatgcgtattctactaaaaggcgtctcgacctagatagaaggcctatagtgaccactactttagcttacgccgagagacttttcggtagctttgagacagctataggaaatacagttactaaataggatcgctcagagacgtacagagttagtatagtccgttttgcgaaggctttaagtattaaggctgaccctatcacagtggatcagcggaactctaaccaaacaaaaagtcattataaaaaaggaaaaagaaaagttcaatttcataaagacggactatacctataccgtatcttcaatctagatggtcgataatcctatcttcatctatagaacaatgaaagtatttcttctattcgctctacagctttatatttttaccagtataagggttagagcattcattccgagaaataagcactagcaagagaggggtcttcgctataaggtatatccaaccctatctatatattctatctagctattaatacttaatagtacatagacctcgtcttatttcgttctacttcttctaacgaaccataggatattaggtagcgagtcaatgaatagtggctcaaaaaaatagaaacctagagtatactatataagttaataacctcattccctaaatatactactttatccttttattccacaaacgctaactcgccctatagctttagcataggtatctgtgatcatagcagaccttaattcgcattaggactgcttcttactagcattagcattaactaaggcatactttacagaatcaatacccttagagatttagcccaaatacggttactcgaagggaaggataaaatcaccctacgctggaggcatgatacgttagagaagcctatattccggaacgtgactgtacaggggatacaggatttgacgttaacaatagaaagattctgttactttcttcgccaaaacttcaggaaagcgaattatttcaaagttccgaaaattcatgatatctatcgagcgcttaggaataaagtcgatagtaaggccttctaattacctacaattcttaggataaaatctcacatttaataagtcgatacggcttagcattagtctcacaactatatagctataaagacggaaaaacctatgaaacgagctgtatagcccactgttcgtccattaatactatagcttatgtccttaacgaggagaaagacgatcgctattataagtaattctgtaaacctgatttacctggctacctagctgctaggattaaagaatctatcttagaaagtgataagcttactaaaataagaagccgtattggctcggcagatataactggtaacaaagacctagaaaagtacaagagactataatataggaaaacctatactcgcctccgcctttcagctcctacaaattaccggacctaatatgttcgtaacaggcaagattagagggttttatcaggagggcaaaaatcacctaacgagccagaaaggaatgcttgtacacgtgcccttgcgctcattatacccaaaattggtcgcctagcagcagtcatatcgcctatagacccgatgtcatttaataagaaactcctcttcataaaggacttgcagaagcagtattcgtgggactacaacgtaatatacttaccaaatgaaacacctgtcaatggaaaatgccctattgcaagctgccaaggagatgttcactcgtgagtaaagaatgtcatatgggatgattaatactgacttgcccagactggcgaactccagctgaagtagatatattcatgaatgcatccgcggctatgaagcttctcagtttagagttagcaagttggacataaagttctactacaaatgtatgcagtggtttcatacaaagcaccaatggcgagaacactgcaagcatcacctacgttgatctgtattaattgaaccatggacgaggctgttgattttgtagagagagtatctgagtactgaccaataatcatgaactgatttttagttgattgatctccgctgtttcaccaccattttactatgattggcccgatttttttgacagccgagcttatttgaacctcactgagttttttttcggtctcaatcttgaaagtgtatgagagatcagagaaaacatcagatttatttcattttcggttctatggatttttgtttttgcttttcttggttcgcgttccttcttttcccagaatcttggcggcctaagtagttgtttcctggagtgcggtggcggcgaggtgccgccgactaagagggcaacggtacttatttttctatgtgaaagctataccacattacgccatttccatcaactacctctggtagagaactcagcatcattcttcagaaatatccaattattagtttagtgagcaacatttctgtggatcgttatacgtctgaagagaacctgtggctattcggtcggattctctgctgtcacacccgttcaacgaagccaggtcaccacggaacctttacccgcgcatcgaaagttcattatgtcgaccagcaatgacggcatgcagacaaatatcctggttccggatgatgcggtaaccctacaaaactcggggctggtcagctctccttcgtccgatggaacacgtcgtattcataaacgacgtttaaaccgatctagcgatgaagaagaacagcatcttccgctgacccccgtatcgatctcctcaagctccgattcctttgtcagtatcccggatcatctcgtctctttggccgcactcgagcatctcggctataactcggaaactgcaactcttatctgggagtattggactaactggccacctggggagcctaagagggagactgatgacactgataatggtgtcctgtttattgacgtcgccgaaggtcaccttgattattctcccgatacctgctcagagaatgatgccgaatggttccactgtatgaatctatatgggatcactcgcgagcttcaggaggcaatcatggatcccaagttccgatcgatccgcctaaccgactcatgcaagtcctggattcgggacacctttcagttacgcaaccgagccctccaggcggtacaagaagcttcccgtgagcgagatatggctagtcgacgggaagcttcccgacctggacaaagtagttctggacggcgatcaatttcagattctttgagaatggttccttggctatcgcatgaaaccgctttatcggaagctgcaacaactgcagcttcaagagcaccgggccatacaaccatctacaagggaattgatcaagctcttatcacggaattattcgaccataatggcaacctagacttcggatgccttatctcccgatcacgttgtgatttctccggaagacaggacgatctctacttcgctattgaccgagaagtggccgaactgtatgcttgctatatcaagcaccgcagtacgtgcagcggggttgtcattattcatatcagtatcccgaactcggtcattgagtccctctctatacccgatatccaatttaactattggcccaacgcagaatggaagtcacttatctttcattgtcgacaggggaaaaagctcccctctaagctccggaagtacaaacttgctaagcttataattggaaccatttgtggcaagccaaaccttgttattagcaggatgcgatctccagatgaaatcacggagcacatggttctgaagactagcgatggacgcaacgcagtccagtacgtgttcaaaggggacgatggagatactttgttagaggagtgcagcagcgtaactgtgttccctttaacatcacgacagtttcaggcctggcttgagcgcgtctgagttactttggcggaataccaatacttgttccccaccacgaaatggcttatgtatttgttggactatcaattatcgagttgatttctaagcattttttactgttaatgtacctagtagtgtaagcctaggttaccggtctagccaatagttatctagcttaggtcgacgctagataggcctggtagaactagccttttgggtattctgagattagtagaaaagtttctaactgggaatacctataatatagggaccaagatagactacccttctggtccaagttggaggattcctaagggtaattctattcaccgcctcatttgctagccagagaagacgagtgatggactgatatgtgagtaacccgcataaagcaatgtaagggtataatgaatattatgacaacgccaatcacgctccatgttctatgaatacttttaccgggatgagtttataatgatgcacatgcttgattaatgcttctgatgtcttcattctcggggatgtacaaagtaacgttgctagttgacagaccgaaatctgtcggggccaatgcccacgacgatgatactaccaacctccttccgtccagcagaaagactaaaatacttttttttttctttcttccttcaatagccatcgtgaacttcctcacgtgccaacccatatcagatggttctgcttgtttccccaactcccgattaaagcaaaaagcaaagggtatccgcaggtccacattcccttccctgttacctcacaacgaggcactcctatcttcataagttagtttcaatgctttaatgaaaatgtactttgtagcttatgtaataatcatgtgatgctcagtgagcgggtttaacgattacgtaatactcaggggcgtgctcagctttactcagtgagcaaaaggcggcaagggggtgagcactaaaacggaaagggaaatccatctcgctcggcctaaaatccggtgtatatgtctctcgaaggcggaacatgtccctccgctctcgttaagtttggcagaataccagaaatccaaccctccaatcatcagcccctatcaggctccatggtggagaatgactgtagccaatcaaataacaagacgaagtatataggaacaacaaggacaggatgtatgtacatggccatgaccttatctgatccctagcacgtagaagggaaagaacgacacgccgccttccaccgtcgcgtcagacgtgctttgtttacttttcatcgtcccactgtctcctggtcttctctatctccatcccactcttttcgcttcagccgactttgaatcctgatcttttcccattgttttattctcaatcattaccacttcactctgcctacactcgggttgggttagcagctgcaactccaccgcccttttcagtctccgtatcaactacatttggccgattcttgacgcgcaacatggcagctggagtctgctactggagtggcaacggctcttattgctgcccttgtcttggccaaggacagtatgatgtgaatgacttatcgatatcttgccgggagtgtggacatccacttaagaatcatttccaaattgggcgtaagggatttcttctctctgccaaactgattctaattctctttaagcgcacccaagtgatgctagtgctagccaagttttgctaccgagacaccaaaccgtgaggaagcttgccaatcgcatcaatgaacaaagagtggtgcttgcccgtggaacgccctcgtcgggaaagacctttctcgcccggtctcttcatatttaccttcgtggacagggagtcaagtcgatttggatcgaacagtttccccctagtttagagggtggtcctaccgcgttgcattacctggtcgaggcctgtcacacccaaggctatgctgcattcggccacaacgttctgctcgacacgtttgtgtttatcattgatgatgcgcatatgacttacaataactctgagctgtgggtacttctgaattcagtgaaccagaaccgtctcgcgaacataccaggggccagtttctgtttgttcggtgcatttggcacccccgataggggtgttatgccacagaacatggggagtgacttgatagtattcaatgagcgtcagcgtcttttcttgtccactaggttttccgaggacctcacacttttctacacccgagaagaattcgatctctacctggaaatgcatttccaggctcgaggttctgattacgaaatttgtgagatcttgaaagataccatctttggcttaaccgacggccagcctgaattgatggatgcattcatgcatatctgtgacatggtatgtgatggtcagtaatgtctgatattttctgtcatgctaacatcttgccagtggtatgaggttctctacaaggatgacgcggatgacgaaatggaaaccataagctatgatgactatgaaatcatgcaattctttcaaattcgcggcatcatggaagcaacgatcgcggcaattgtcaacttcgcgggtcttccactttctcccgaaacctttttccctcccgaagcagagtttgaagttcttcgccaggttcggcaaagcggtgattacagcatttcgttcaacccacaaagtgaagctatgctgtcgtgtatcacgaaaggttggctgcacatagaacagagccgacaaggaggattcagatgttacttcccaacctactttcacaacaagtacgagacatgttattttcccaagcctggtatgcgtactaatattagaacagggtcgtggaatacctcatgggagtccaggatcttagatatcccaccccgcctactttggacagagcggaacttgagttgatgttgagcatgcgcaccatgacgatttcgtaaaggaagttggctcatgcaaatgccgagaacagcgttcgccagacgtggaactcacgctagatattcggtgatatcatctttctgagggggttgctaaatttgtgtctgtggatgatgagcgtgagttcgaggaatcctcttatgctgcatcgtcggtttgtgtccttttttaccatgttatcatgcgtaaaacgtaagtataatttgtggaaatactgcagcaattcaagttgattttaatttgggtatccctgtaactatcccctatgttgtaagatgtagaaattgagttatggcgactattgtagggcggtggacaaggcggtatgtagtatgtaaacggcggacctgtgaattactgtatcgggttagttttgccgttttgggtttagcgccccaatacgctgtcacgtaacctcccttcaatgccgctgacataaaagacccgtcttcgctgctcctcctccctttctctcacttttccattattctgcctctctatcttgcacttatcgccgccccctttcttttactccggcccctaccgactactgtacatttgctttcagcccgacgtactgcccctttcatttctaccggagatgccgcttaatccgacatccagcttgcaatgcctattacccagaagtgtaactactgggataatacagcatcctgttaattcgtgttaataatcctactccttccctagggcagtgactaagtaccatactacaaagatatctaggttaccctctgccagtacgccttttcgtctctgattccgcgggcctctaaatctgcaaagtgccagtataccctcgacgctgcatatccctctcccgccgccctacctgaggttgcattgcacagcccggctttatagaatagctcccagttgcctggctaaacgcccagttatcgttatcgtcggtctctccggtccctctctacctagtcggtgaaaacttgaaatcacagctcggtcatatgggccaatagcgaaaatgccgtacacgccctagaccttggtcgatactgtatcttgtgatcaatgcgagactgtaactgcgggaattgttgttataggctgtgaaactggtatagtctagcgtcctcgactgcaatgggttagatagtaggatctggttgagattatctactcctggtagaagaaggattctatcttccgggcctccgtcgtcattatctataaaagagactacaattccataaatatggtaaaactagaattcgaatcacctttaaatactcctcttcgcctgttcctattctctgccagtttttttttttgttttatgagtgcccatagtcactatatcctaaagagtctttagccgtctcttcacaatatatattaagtgtgagttttccctcgtgctttttttttcagccacggaattgcgtatattgcctcacctgactggacgctgatcctcacgctaagcagccctttagagacgattcctttgctatggccctcttctggcgaggtgtagcaaggcagaacgtggactttcgaatatgaaacgctttgatctaatgggagaaatgccgtatataccgtcggccttgcgcgtgactccttagtgatttccgttgtggatgggttggtggatcttcgtatcggcaggctgcgctttgtctcatgactcttgtcaatccaacctgctcaaaacgctcagaggaggcaggggacggtaggcaggtataaagggtcgttggaactcctcaaaccgagaaagaggctgactatctgtttatggttccttctcttctattctgatgtagggtctactatatatactgctgcagcgacaatcggatgttccaatcgttgttatgattttttggcccaatggctaaatcctcttatataattataacaaacgagatttccatacacacacacacacacacacaattcattaacgcccggcggctgagccgaaagggcaactatcgctaaactactatacatgtcatagtatatacaattctgtgactcattggagcccatacacaagaccttggcgtatttgtcattctcagcatgcagtgtcgcagcggatgctcgtgggttagtaagttggttagtagactggcttgaaggcgcttctccaagtgttcaacatcctatcttcggcagttgaagcgcgtccaccgtgaatagcacgaggtggttggtgggttagattagaatgaaagaggggtgatttatgttcgtcggcggggttaagtggcctcgaggcggcctgtggctatggcgaatcgtattgaggcccgtactgcctctaagtttggcgtccacttttgatcgtcggaaggcgacttccctcccaggtaaaagggcagatttcctcggtgagtgtcggtacattgtagcatatccgtccggtgtgtggtccacttccgacatcgaaagaggaagtgctccacagtttccttagcttgtccgcacgcacactgatccgtgtcggccgcgttgattcgatagaggtatccattcagtctcgccatgcccgtccggagttgggctagcacggtcgcttccttccatgacaagggatcatacagctgtcgcgtgtgttttcctgggagtgctgcatctactcgtttggcgtgctttccgacgtccgctggcagggtatttctggggactgcttgagaccgtgcgagattcagcgtggttgattttatcctcggggcgcgttcttgcaagagggcatcttcttgtgtcgcggctctagcctgttctttagccagacctagcagcttgttgtcttcactggcagaaacccagcggacttgaacatggtttccgtttctctgcaaccttttaatcaacttgtatatccgacacacgaactcctggccagattgttgtcgagggttcctgagtgtgagaaccgccgctttgttgcttgtgagcagtgcgatcgtgtagtctttcagtcccgtcgccgtgctcaatacatgtgccatggctgccagttccgcagagaatggattctgctctgcccttacagccaaggtgatggatagcgctttgtgtttaagcttccgattccgaggtggtcgcttctcgatggccactccaaaacccaccagctcgtttcgtgcagagctgctaaccgcgacctgcatgcacccgcccgcttcggccagggactcatgctgctcatcaatgtcggtttgtacgcgttccgcccacggggatagcgtgaaggggttgatcgtttctaatgtctccatgtcgatgtgcttgagcgtatcggctacgtgatacagtggtgagcggtggtatcttctgaactttctgatctgatctgtacaccggcgaagaggattggtttccggcaaggtgtggatgtctgtccacattttcacggctcgtttccaaaatcgacgttgtgcagtagccatgtgagcctccgcctctgcgacactagtcgcgactgtgagaaatgtccccacaatggcttgcgcgcctactctttggactcggttgatcggccccatggctttatccttgcacgcgtgcatccagacattggaggcgtagtccactactggtgctactgtcgatgcgaatagctgtcgcgcggttgctggggagaggcctcggagtcgccgaagctccatcgctgcttcgagacccttggacgctgctctcgcgatatgctccttgtacttaagtctcgtgtccatcaagacacccaggatcttaacgtggtctttgggtaccaccgtctgccccttgatggtgaatggctcatggtccaatttacgcatcttgggagcaaagtgtatgatagccgtcttgtcagcctcaaatgtcgctccgcttctcttttcccagttgagtgcctcgttgatgatggcttcaattccttcccggttactctgcgcagtcggaccggtcacccacgcggtaaaatcatccacgaaagcgactgctcctccctggctgtcgatctgtctttgcacgaggtctgcattgaaaaacagaaatagaatcggagacaggggcgagccctgcggcagcccagcttgtggcaagctttgagtctcagataactgcccgttgatcaggatatttgccgttcgttccgagcagaaggccccaacccaacgaagcaagacctccggtatgcctcgggctttcatcctctggatcagtcgttctttgcatactccgttgtaggctcccttgacatcgaagctaatcaagctcagcactcgtcggccgcgccacgccgcatagatctgctcctgcaggaacaccagtgcttgctctgcggaccgctgctttcgagccccaaagtggctcccccggcggcagtccatgcgtctccaccgcgtgcgagatcctctctgcgatcaccgattcgagtatctttccgagtgtcgcaaggagtgagataggtctccatgcctttgcaatggtgtagtcatctttattcggcttcttgagcggtatgatcttggcctgtctccactgtcttggcagtgtgccctcttgcagcgaggcttgaaagaggtcgaggaccctgtgcttgactgagggccacgtcatcttccaaacgatcgccggtaggccgtcttcaccaggtgccttccacgacttggccgctgacagttgccgctctatctcctccatagtgacggctggcatgtccacaggcgctctttgtggtctcactccttcctcgtcgatgttctctggcaaaggcgggaaaaacttggatatcaattcctccgcttgctccttgtgatcgttcgtagtggttccatcggctctgaggagctgcggaatcttcccgaacgcggcattgtctcccgacttgaggtacttggcggctttccagatgttgtcgttgtctgcgagaaactcgttccagtgcttcttcttttgtttgcgaatggcatcgtggtattgtttggccgcatcctgggccatcgtttcgagccgggggacttttcgccccgcccgtcgctcggagcgagcacggtttctccagtgcgtatatatatgacggagttgagtgaggtcagctgtccaccatcgcttcgcatgtggtgatggtttcgccctcggggttaaagcgtgtaccgcttcggacactgccaacatgagtcgatccgttttctgctgtaccgtgccctccgacggaaggatggctagagcgttctgaatcctggcgttaatctccttccatggtgcattcttcagtaaaagtcgctcttggtgctttgggcccgaccactgggcgtcgaacacggactcaatggcgcagtgatcagagccgtggtctgtctcgagtaaagcacattttgtcatggagtccgtcagattttctgaagctaggacgagatcgatggtagactcgcagtctccactttgtccgccgccgtgccatgtcttggtgccgcgtttaagcaagctactgagcgcaaactcattcataaggtcaatgatcggatccgcttccccttgtcttcccagcgacacctcgtctccaccccagagttgatcgtgtcggttgaagtcccctaccatcagaatctccaccacggcgcctgtctctcgtcgtacttttgtgatcgcatcgtgtaaatgattgcacgcatcgtccaaggctgagatattgcctccttcaacgtaaaccgatgccataaagatcagtcgctcggggagcctgaccatcgctgctgtgatgtctggagactccacagggacttgctccgcttcgacttctttgttgacccagagcatgctccgaatcgcccatctcccctccctccaggtagagggcaccatctttgtccacttgtgatgccccattggagtggtcaagagccggccttgaatcctcctcgcttggggttcctggatcgctagcgccaccgcgttttgagtgtcttcgtcattcattaaactctcgtgcactgcaccctgcttcctcacgttcagctgaattattcgaagagaattattcatgacgtgatggatagagcttccggcagttcttgctgtacgattcgtgaggccctccgcacggtacacactttggaaccggttggatacagtcgctgtggcgatggccctctgtagcgcatttcgcgcatttctgggcgttcttgcactggaatgccttatggcctatctcttggcagttgtaacattgtgtcggtcgcggtcggtgttcgaagacactagtcacaccagattctccccccgcgtggaaaaatccgtcggccaagagccttcgcgcgtcgatgcgtttggtcaggtaaaccaccattgaaccgtaggccttctcgctctcttttctgctcagccatgaaatcttggctacgttggtctcattctcctcactaaacgctgctgcagcctcggttcggacctcaccgctctcgtctagcacggaggtcttgttgacgctatcgactttgatcgggtagagctcgtcacggaggacccgagctcccgccccgattttctgttctgcaacctttttgaccagctgctgttcatcctcatcccggcaggcgatcctgatccggttggcgtttttcgggtcaacggtaacagcgcgacagcgccagtgcgcgtggccctctgttaactgtatctctgcctcaaccgctgctctgaccgagcctgcggaggtcgattttgtccctttttctgccatcttcgaggtatctatcgtgcaaaatagcgtgtccgtaaaggtggtgggtgtcgtgttcagcgttaaaagggaccgtatgttgcttgggtaactggacggcggagtgcgcgcgacatctgcgtaggaaggagagcctgcaacagcgggaacactgatttcctcgcgtaaggactggatttcgcgcaggatcgcatcgtggttgttctgagagcacgtctcagagtggcattgcggtgtcgtgtttctattcgtcagggactgtagctcgtgtcggacctccgcgagggcggtaccgaactgttctctggttctctgaatttcttccttgtgtatttcgtcacggagtctgatctctcgcctgagtttggcgatctctctcaccaaaccgccgacgtcgagctcttcgcgctcggtcgcggcgtcgtccgaagttacctcgtcacgccggtctcctagctcaattctctccttttgctgggaacgcgtctttcgtcgatcagtgtcaatttcctgctcacgagcgtagttgttcggtggtcgagtggtgcgtttcggtctcgccagtcgcggtggcgaatcttcgcgttcgtcacagtcgggcggttcaggggttcgcatcgcggcccgtcccgccattggtcacagtaactcactagacgcgctcgaaatcctgatgaaagtaccgagagacaagctacagtacttcccgaaactctttatactgtacgagctatacagtacgtctccgatttccatacagacgcgctcgaaatcagtttcatctctacactctctttaattctttactgaactttgttttgcataacgctatgcctaatatagctagattccccctgacccacacttttggcagtatcttagtacggtaatatataatggcataaaaatagctatcgtatcatggttgtatgggctatgcgtgtctagagccattcacttgcaaacaagccaaacagccgaggtggcaggagattcggtcggttatctggccacttctcacctccccctttagctaaccacgttcaatcgactattctacaaatatagtggacgagcgaagacatacgtagatacaatactggtaggacgaaatattttttaccaaccgacttacctgccctacaaatgctggattcctttagtccccttctgttgaacactggatgaccactatgtgctgaagttcggtttattaggaaattgaggacgatgattaaccacttctatcccaacggtgatgaatcccaaccccaggacctcgatccgtcggaccaggactcgcaatacgccccaactcctgggtattacgaacacacgccaccatcagaatatggatttagcccttcaccgaaccgttgcccccaggacggttccgagcccttactttcaattccaccagaaaccaataagctgcttcagctctccgagtgggaagcgaataggccagacgacgagcttcccgcaagctttattcggtatactatcgagtggaaagtcaaagtgaataatcggtccatatcagaggatacggagcaggacgtagcgttgaccccaagtgcttactggcccttggccctcagggacaagctgtataaggtaatcgaggagaaagttgcgcgtaaacgaagggtcaggtccgacgacacatccattgttgtgtcgatcaacgatcgcaagcaacacgacctgaaaaagcggtttaatggcctcaatattgactggtccgccgtggaaaaacaattactcgtttgggggaaattttataccagcggtaaagagttgcggctgaggataatcttcaactatatagaggacgaccactcccctagaagcgtaacaggcagaaccgacaaaagaggaaggtcatctgttaccaaaaggatgcttaacgagcgagatgaataactcgacgccgaatagtatacaactggggaacaatcgatctggcgggctgtctacaacttgatacgttgcccttcgccgtcttgtcatcttggtccgcactgctggcaggacccacatgggaaaaaacactattaactaaggacacatcatttgaaacgcctgatcgcttatgtcgaaggcggtggcattctggagtgtcaagatgatgtccctgacgctgttcgcgaagaactcttcttagaagaacaacagaaattggaaagtctacaatctaagggcaacaaaattctcgcgccaggaaattgcccgcctatcaatatcaacttcatgggagggcaacttcacctacaatcgccggcgaccaactcaattccagcattggccacacctccaccgcaaaatggacagatagtagatcagctcataattgacgggccccgagatgtggctgtgagggaatacaccgcgtggcaagaaacaaatgttgttgacgacaatttgaaggctcaatttcgacaggcatgcgatgtaacgctggccaacggtctggatcttgaacagatccatgaggaccatgaccctgggttttttattgaaaaaggagttgcggtagggattgcacgccgcttcataagcgacatcgatagatgggtgaggcacgtaagaaactgattgcgcaggttcgcagtcagagtggctggcaaggcgtgattagacttggatttactcatttatttgctttcgattagatgtacttcctacaatgtagtcctaggcaagatcaatacgtaatgcatggattatctagtcaaacttgccaacgaaattgtcttatacagaactagtgttgatcttgtcagacaaaaatgggggcaccccgtttcatagatacgggtaacctgatatacgaggtgcagactattcaggtgctctaacagatctataatcagccccgacgctcaatgatagtcttcaacaacaacgccagcatggcgaaagtgacccgttgcacttcgttctcgagatccgacaacctcgacacaccactcgaggaaagatgcgaatccttggtcaggtctttgttcatatcgccgccaattacgcctgataaacgccttcaattcagagaaaaactcctcgataggattcaaatcgggtgaataaggtggcaggtaaaccaattttactcctacagtagcacatatttctttgattcgctcagaatgatgaaaagatgcattatctatgactaaaacggactttggttcgggccactttccgcaatgtctgagaagctgcttaataaagtcctcaaaaacagatgcatcagtcgagcctcggaatacctgagaaaaaacaacaccatcttgggcgtatgcaggaaggatctgatatcgctggtcacgatggaatttggatacctgcaaaggggtcgcacctaccggagaccaaccggtccgtctaaaaccaattcgtttatcgtatccggactcatccatatagactaagtgataggattggaaatcagataggttgtgtaggtagaagtctcgcagatcggcgttttgctcctttgctctttgtcgagccacctttttcgaccagccgacagatgcaagagcccgcttgagactcgaatttgtcacctgaatatggaattcatcctataaaaagagcgccatctcgtccacgtacagcccaggcttctcaagaaggtgatcacaaacggcctctagcatcggaggggtgatacttcgttgtcgtccgacacgagttggaggcgctctgacatttccgaattggtgaagattgttgcggatgttgatgattgaacgctcactacactcagctgcttcggccatttgtgatgtgttcagggatttgctaagtatcatgtcatggatcatctcgagcttcgatggtgggagccttggcgccattttgcggagggacgatagaaggtgttgtgggtggaagccctataaggcattgactgatgggcaatgttgggcaccatgtggaattctccatgctcacccttgctcacccttctgctcagtaagcagatgaaatgacttttggtcggacgtctgggggatggtggggtattgggaaatgcacgtgaccctaagtctcgtagttcccaggagcatggttgtttctagaagaacgatttaaaaactgagggccctcaattattacaagctaggggcaaagtgacaataccttagaagtcattgatgctagatcgtgcgcttagtttctcctagctgattgactacaggatggatggatggatggatggatgatttcatttacccccgacccctcgcagagcgatacgcaggctacagcaactatatatatccgtatatgtacatgtatcgtgtcccacttcctgaaaacgaacttagagcctatcgtggcctagttgccgctcctgttgttaggctgccctcatggcgcgcgactttggaaccgttgtgacgcctctgcgaagtctagcacaaccgtgaccgtcctagcccgagagacggtgtctggcttacctctctcacaccatttgagcctcccggcagactcgacacgctgttaaatgcgtccccaccttctctcttaattctcttcttgatccctgtagtgttggacagtccaccaagacgtgggtgactgtttcttgcgcgacgcgcactgatcgtcgtcgcggaagccaatggccttcctgaaggtggataaccaattgtgtcccgtgcgtagctggtgtcagcttaactatgtacggttcgttccgccacgcactctcatgattcgccccctgcatttcctcttcgagtctggtgtgtcagggcttatggttcgccgtgcatgcatgcaatgcatctgcacgttttcctctttgtgattgcttcgatctttgttctaggcccctcttttactaggacgctctattgcttattgccatataccgcctcgacgatattattgtcagattagatagaccccgcacatctgctgacgagactgaagtctgctaccaatgctcaagattgcccttacgcaaaaattatccttgagaattagaatactcgttgaacaccttttacttagctcactgatacatcacctgcaacaaaatggagtgcctaggtgttcctattgaccatcgactgcggcgagtgattcgtgaggcaagacgtatcgatcgggacaaggaaaattccgaccatattcagcttcttcatagctttggatcatctctagaggttgacgagagtgactacccgatatgtgacctgagcttcggactcgaaatggcgcgaccagaattgaagggtggtgtccttattgtactggaacggcctcattcgaaacagaaaaactcggacggatttatggaaggcaaacgcaactgccgaaccattaatgcagtgtcggatcttatttctgctgtaaacaacgataagttgggttttgacgatgtcagcttatttgatgcaataccttttctagatgagacagtcgcgggaaaagatcaccaggatatcatcaatgaagcacagaatgttttcgccgatatggctagggctaaagaccctgatatcattctatgctgcttcaaaactgagactcaaaactctcttgtcaagaaacttcagagccgaggagtagggcggagtttctaccctgataacccaaagcttaccggatttggtttttcgtctacccttgtgaatgcatttcacccaagttacgctgttaactattatccaatatcctcttgcttcaagcaactcctggttctagagtttacgaaggcatttgctctttggaggcagagctggactgaagagccatggatgaaggggttaagagatgaatgccggatcagagcaaaaaggaaagtcggtggtaagaaagtctaacgtgatatactccaacactttctcattgcattatacagaaaagaatatcgacgggaaatggaaccgatcgtatatcaaagagcagtgggaagaacttcttacctccctggatgcacagtttgaaaaatgtttcttccaaaatcctaaagatatcggggcaggggatttgcagcgcaagcttgtggattcaaagatcacctggctatcttgcgatattgcatggattctcgaggaactaacccccgaagaaacaatcactttggaaatgccgcaacagttgttgtgcaagcttcgaagatggtgtcgtaaggcgtggccagaagaccaacttcgacgcaatccgagcaactctaatgggtactacgaccatttacccctcctgcttttaaagtcaaaccaaccgagcacacttgcaaaaagtctggagagcagactctttggcctccttcgcgatctgaacctctcttttaatcgattgcataacgatgtttatcataatttacttgcccagagatgtgcttttcgaaggtttgctgctgctttcgaggacatactagaagacattgcggacaatgatctttccctggaaggaaccgagcttcaccacgaaatgggcttcttaagtctgaatggaacagcagactaatctctctcgcaagtcacgaacaagagatgttgatggtgccatctctcgttctagcctttgggtccttcgtttcagggctgatgcgcgcaacgcgcacatctttcagttcaatacatttcggccattgaatttgagctaggtcaaatagagattagcgtgtttcgagagagggttctggaagaaatccgtgtgcgtaagtggtgaacctgatttcgatccaacctggacatggaggcgtcacagaggtttcgcagtcgtgcgccatgagggcagcctaacaatgggaacgccaattggccacgacaggccgtgacgaggctctaaggtcatgtcaggaagtggatcattctatgtgtacatactcggatatatagttgttgtatactgcatatcgctttggcgaggggtcagtgtaaatgatacctactactacctggacatggaaagctcgtccacggctaccactaccttaatttctccgcaacatctcttccatcaaaatgaagatttggcggtctgacaaaaaggatctcctatagcctattgctatatgctgggccggttggatgttagccacaatggtgttgtcgagggcgaaaagcatatggctagacaatatggcggtcacaaccagaatccactatagttcaaaagcttagcagtgttcaggaggaaccagaccgatccaacgaaccttgaacccggtgatggttctccctccctccttctccacctcctcggaggagctgtcatgcttctcactgagttgagagatcgagctaggagtgtgagaatccgccagagcagactggagctcggattcgcctttcagaacttcagtcattgcaactgatcaggcgctattgtccagatctatcgaggctgctctgcaaagaaatggattgcgagtgatctgatgggtctgctttttggattttttgggcacggttcgaattttataagagcagcgtggagctttaacaaaagcgatgtatgtactgaaaccatgaccactagtattgctaacacactatgggatgaaactggaccctggaatttacaatctgggattgcgatgggataccgctcaaacaaatgaaccggacgcgacgggatcccgctggatagcgacagttctttacgaaactcaatacgaagcaacaatgggatgcccctgggatagtgcaccgtccatacctgaatcccacacgctatcccagcaggggttccatcgccatcttactcttggcgacaacgacggcttatcccacggatcagggttcggagggctaattaaatagcattcaggctattgcaagcgaagctaaatggactccgtgatgtgagagtcagaataaatataccgtttacactctttagtatttgtctcccccaccataactgtccctttgcattccgcccgtctacaatctcgttgaaaatatacatctgcggttgacaaaaaacacctaccatcattatgaccatccaccgcattaccttgttcaacatccctaaaccggagaatatcgacatcctcttggctgaatatcgtcaactagctcatgaagcaaccagggtatgccttgaccgcctatccacattgacaaggtgtatgctgtcattttctctgactgacaatggcaagcgctacgttcgtgattgaaatacagaattcagagccttatattctctccgttcaagctggtcgtactttgcccgatgcacgaaccaagggctatacgctagctgtgaagacaactttccgcaatctggatgacatgagcttttacgattcgacctgtgaggcacacaaacgcctgaagtcggtggcagcacctcttagagagggtgatgtgttcactgcgtatttcgaagatgaggtggcattggcttgagtgtctatttttaagctttgagaaaatattatcgaggagatgccgataccttagatgaattgcttcaggattgtagtctatattataaggctgagttaacagacaagactgactttgggtagtagcttcgattattgtcaacgtcagaagtctcgatatctggcaagagtatcatgtcttgtaatttatatgccggctcaattcaactggacttttagtgttaactaggtgctatgttatcttttgcaccgttatttcaatttccatgcatgtatttgtacaagaaaagagagagatacactgcgtggagattatcctgaaaagtgtcatatccaatgaaattttgcatcacaaggctgcaaaagcggcgcagtttgagaaatccagttctcttcaatgttctcattgctatacgcggctgggttttccgcgagtcgcgcagccaagtccgaagtggcatgccagaactcacctttatctggcaatgcaaattgcagatctgtcagagacagaagacttttcccagggctgaaactgggcgcgtcttctaggagcttggggtcatggattcgggactgccggcacactctgtacaacgacaaacaaaatcgtttgacctcttcaataccgagccatataaatacgtcgggatcaactccaggcttgaactgagttaatatcgaggatagaagaacattttccgctttagacaggtgcgcacaagagcgacgagaagctgagagggtatttcaggcagagcgtgcgttaatcgcaggtctaaatggtcatggtagagaagaagagaaaaaatgagatgcaacaatattccttgatatgttgccattggccagggactgggctcggacgagggcgtttcatcttgctgcaattgtgactcgtgatagtgatttgatatatcccatttttcctatcgcactctatatcaatatgagaaaaacagaggaaaggtaaaggtaagaatatataactgactctttgttcatagattgaggatgtgagtttgtgatggaggtcttttgcagtctgtcgcgcattgctttccccggtcgcccaaagtcccatcataatcactgattgcaaaagaaaagctggctcatgatcaggatcgaatgtagcagggtgtaaaaaaggccattttgggtgaaaattcttgaaataagcctcgacgtatggtacgtatggtacgattctacttgggcatttttcaatcgtttctgcacgctgaacagaacttggttctgccgcaggagagtagggataaccaggctctacagatgctactgagctcatgtggccatcagcgttctttgtttgtttcaattcacgtcgtgaattttgggtgtaggagcattgaattcctcgctggaaacaggtatcacagggtgtctgtccgttgcatcttgaccttcgcgagcggcagtagttgcaggcttggactgcacgggatgattgtaactccttatttctatggagcgtacggacatgctgacgcagcgtgtcattcctagcaaaaacgcgatcacaaaaagggcattcataagattgtgattggaagtggcttttggcatgtcgtgtaagatgttccttgcgtcgatagccaaggccacacccggggaaatgacattggaacgagggtggctgcggagtcatcggaactaattaggcgatggagacgacagagcgtgagggaatgaggtgagcaggatgggccgggaagatcttcctgcccaaacgtccgaaaatcgacaatggggtcgtccaggagtgagaactagcagccacgctgcaggtataagcgatatggaatgggatggcgacacgaggtgggacccccgatgggaggatgggataccgatgggataccgatgggataccgatgggagtagccctagatgggataggagggatggtgggatgatgggaggataggaggatgggaggatgggatagcggggcaaacctttgcacgtcaggattggcaacgtacaacatacaagggacgggactgaaggaaaaaatcccacttcttggtggatcttcccattccttcctccagaatcatccgaatcattcagtaacttcatctccaattcacatagtctctgattatttttttgcttttaggttttgtatccttctaggctgtcttttcttctcatccattataagcatacatcatcattccacacaagagcagccacatgctgaaatttccctcaatcacttgttctgagcccttcaacttctcttagcatcgctgcttctcggcacagagagctttctgactcgctctgtgtgctgcatggccaccccacccgcctcttcacttcctgttcctagtgcttcctcgagggaacggttttttccgaaaacaggtagtggatacgtcaggattttgagcttatgctgcaaaatatctccttctcatctggaacgacttcgaactcctttttcgtggctttccctttccatcacgcattccctttggtacgtatgctaaagccattgtcattcgagacagccagaaggcctccacattctggaatggttatctccagggatatcttgggaaccgcttgtttcaacgccccatgattggacagaagaacgctgaaacgagtgtatacggcgatgttagccttctctctcaagcaaaggagtttgcacacgagcatcaagttagcgtcaaagtggtgctccttgccggctgggctgtcaacttttcccgccatctgcagagcgatgatgtggccttttataccaaccttcgggattgcagctttgacacagaatatatcgttggtcctatggacgtgaccgctcctcttcgaattcaacctttggagaacgagtccacactcgaagctctctatagattggaaagcgaaaagagaactgtttctcaatcttcctatgtgggaggaagcgccatcagggagtacagccaaagccaagcctccctgacgtccatgttcactgttcgtgaatcagagatccccatgcacaaagttgaggccctcgatgttaccacagaaacaacactcaactggccaactggccaactctccctggtccatgactcgagttactcatcggcccgagccaagatcattttgcagcacttctgggaagtcctccagcagatcatctcgagtccatacgaccgattcaagagtttgagtctcacgtccgagcaagagaaaagctccctgttgagcttcaggtcttcccgtggaaacgtctcccctcaggtggggcataacctgattgagaaacaaactcgtgataatggagatgctccagctctacagtttcaacttagcgaattcatgagctttgctaagctgaatgctgctgcgaaccgtgtcgctcatcgtctcactgggttgatgtcgacagggaccatcgttccggttcacatggatgtatccgtccagttcgtgattgttctcctggctattctgaaggcgggaggtgcctatgtgattcttgatcacttccagccaccatctcgcaaagcatacattctcaacgatgtcaaagcaccattctacatgaaaaatgggggccctatcaaagggattgcagatgtgctggcttactcaattacggatctcatgcatggttccacccccgatgcggaaatcgatttgggcttatctctggaccctgagcagcctgcatatatcatttatacctcggggtctaccggtgttctcaagggcgtggtcttgagtcaccgcgcggcttccactgggatcctctgtgctccagatatatccaacaaccgcagcctgcttttctacaatcccatcttctcagcagcccagagaaccattctgtctactctagccaagggtggctgtctctgcctggcaagttgatcgacccttcaggggtctctgatgcgcttcatcaatgatatgaaagtcaacactcttggcattacatcctcaaccattgcgctgttagaacccgagaagatacccacgctgcagagaatcaacctcacgggtgaatcactagaccattccgttgttgcgcgctgggccagtcatgtggagctgaagaacaactacggtctcagtgaatgcacacagctcacctggggacgacgcatgttttcgggagaaaagctgtcgagtcaaaacgttggacagccattagacactacatctgcctatattatggaccccgatacctcgaacctaacaccattcctggttctaggagagctgtgtcttgaaggtccccagattgctagcggttatctgaatcgcaaagaagaaacggataaggcgtttgttgatagtcctttcactccggggcgcaactatatcggactggcgacatggcaattcgactggaagatggcactattgaaattgtcggccggattgacttccaaaccaagatcaacggtcagcgagtagagcctggtgagatctcggctcttcttcgtcagcaaagctcggttcgtgcagcagttgtagtggctgccactgttgagcaagaaaaggctctcgttgcttgcatttcgccgagtgatacatcactatcctggcctcgagttgtctccagcctccgaacagcgacattggctagtctcccatcctatatgacgcctgcatactggatgccattcgacgacctgccggtcaatagcaatggaaagacggatgtgctgcaacttaggaaccgaatccaagcgatgaagcgttccgatcttattggtgcctcgatggatacagaggaagttcaacgagaactctctaacatggaaaaagtgctccagctggcctgggctaaggttctttctcttccatctgaggttatcacaatcaatcagtcattcctggcgctgggaggtgactcactcaaggccttgcttgtcatttcggaattattgtcccacaactacctcgcagagcttggtgatatgcttcgcgcagactccttggctacagcagcgtcttccttgacatatcaagaaaatgcatccgcaaaccaggattcaccaacacctttcagcttgataccgggcgaaacggacgtggatcggacaacatttgaggacgcataccctgctacaccttcccaagaaggtatcatctcagcgcataacagtgcagggggatatgtgtatcatcgcgtgtttgacatcgaagggtacgacgtgtctcgacttcagcaagcgcttcagatggtgattaacaacaatgccatctatcgaactgggttcgtggcgcacggcacggggttcttgcagatggtccatcgacagtttgagctaccttgggacattgtcaatgatacagcttccatcgattcctatgtatcacaggttcggaagcaagagatggacatcgctcaacctcttgttcgtgcagccatcctgaatggtcacatcctcgtggtcatcatgcaccacgtgttgtttgatttctggtcatccaaagttctcgtccaagatgctgcagccatctataataatcagactgtggcttctcggttgtcattcaacattttcgtgcggcactatcagcagcaagtggatgagaaggcggcctcagatttctggtccgattacctccagaatacttctgctacacgtttgaccctattagagggactgctaatgttgtgatggcaatccaggtcaaccgccaacgacctatgattgatattaaaatgtgggtatgggattatgtcaatggcaagtcccacagatcccaccatattcaggtttcagaaagcgagacggatggagtcaacctgtccgggggtccactcgtcattcccttccatctcctattcctaagaaatcctcaaaccccaagagaaaccaacgtggtaatcgatgaagaatcgttacagaagattgccgagtggggatgggatatgcaatttcagtaaggacttatgactgattttgaatgttaattcagtgtctcagccgcacatagatttcgttaaaagaagattggtgatggacgacagagagattcgtttcgaagagacaaccaccccttgccaaagctgattattatcgagcttgtaagattctttattggcttttgacctcggcgggaaattgtgacaggtgttccaggttccgggagagcatgttttgctgtagcatctatctgcctgacaagaaagacaagaaatctacagtcatcaaaccgtcctagtccgttgctcttaatggaagcttcgtccctcctaagcacttggtcttatgaatgatgcgacttcgatgatggtgagcattcgttgtgatgtgcaatcctcacgaggatgaagaaaaaataaatgtacttggcttttatccatgtttctgagtgtaaaattccctgtttctccatttatgtattccttaagccttgggacgttctgggatatccttttccttattagccccagggaagcgggaacctctatccttgaccttcttctccttcttctgtacaactggaggcgggtaggccttgagggtgatttcctgccattcgggtgaatctgcataggctttatgaataggtgccatgagacgggtcagagcctctgctgctgcaggctttagatcttggggagtcaactaggtgatgttagtaggtttccgggagcaagtaaaaatgttaacatacaacgtcgtttgtgtaatcctctttgagttgttggatgttagtgtagatgagaggttcgttatcccggcgtgccacgcggaattccttcttgccagcgagggcggctgcggggagcaagacgaattccaccatggcaattatgccattgttctcgacgactcgagggaccgcttccgatttacggatcttcttggcgactatctcaggtgggtcgaggagatcaatcttgctatctacatggggttagttttgaaccttttagacgggttctttacataccttcgatactagagctcattttgcccccgctgaggcctgcaaccattggagtgataagatgggcacgctaggagttgaaaatcattagcgacattcattaagccttgccccatggacatatcctttacctttcggtatccgagtttgggtagccattctgttgctgcggtgaagagcttcctctgatccaggccttttttttggttagaaatagtgtagatatgcaagtaggattagacataccgcctaattcggcatcgaccttaagatactcctcatcgaggacctgaaggatcgggtagagcaggccgctcattggggcgttggtagattgcttcacaatctctgcaccagccttcctacaatcatgctcagaggtcatagcggcaagccggtagacatccataacatagtcggaactccgctggtaggaactcccaagcacgaactcgagcttctccgtcgacacgcccacagcctctaggactgctgtgatgatcttttcgtagtatttgacacggttttccaccagttcgagaggcgctttcattgaatctagaaacgcgtgcacgtccgcaaggagaatcaccacctcacatcctgacgctagtagctgggcgatcttgattgcggcgacgaaataaccggaatgaggccgaccagttgtagcagtgcctaaaaaaggacaagatatgtcagttcgccatattgaatggtagaaggtagggagtcattaccccagtacacacggggattgcgcccctcggcaaggatgctctcgatcagttccgggttaagaatctcgccgagattgtcccgaatgagatcaaatctttcctccgcagataaagccattgttagacagattgaagaatgggcaatactaataatgtaaggggaacagataaagaaaaagtcggtccaaaatcaccccgcaataaaatctgcagaataaggcggtcacacggggtgagtcaccatcacgtgactacgtaacatctgtacctgacccgatcaataactataggggattggtgaggctcttcaatacgaatatagtcaagttctattatctagctggtttatcttctgtcacacatttcattccctcttgacattttatctgcatacgtgcctcaataaatacagagaagagatttaattggtatctgcttgaaagtagtgaatatggctaatgtacagtctatggaattgggacttcttcaacgatcacgatcaagcctttgatatctaggtggccaaatttttacatcaaccacttcattcggcgccccacggtagaatctagggtaagggtagcctcgagtcgcgcccaaaccacagccaatgtcgccacaaccagcaatacaccgaccataatgctagtattctcgtagcttcgcggaccgacactcttctcgtggtttccgcggatcagtgcacccgcaactggggttccaactaatgtcgctaatcctcgcaccatatacagcaaaccattgacactgacaaagttctgtacaccgaacaactctactaggctcgtcgggaaaagagcgacgtatgctgaagcaaaaacgccatagaagatcgtgaatgcaatgaacagtgtgctcccggtagattgtgtggcggatagacacgagggaagccataatgcgaggacagacactgctgagatgagggttgttaataccaatgtgttgagtcttcccatacgatcagctgcatggccgatgacgatcttgcctagcgcatttgcagcattagagatggcaatgaagtttgcagacgttgcctgtgagtagcctagtgtacgagcaaaagaagcgaaaaagaacaccggcgtgtagtatgcagcggactgcaatgctgcacccagagcatgggcaacaaatttgcggctttggacgacgcgccagtccaccaacggaaggcggaaaaatgtagaagaccgggaagaagcggcgttctcggcttgaatacgggtgatctgactagcaggccagcgtataaaggtccctgatccgcaaatgagtgcgaaggagatccccgccgtgacgcgaagtgtattgcggaatccgagagactcaatgaggtatcgaaaggcgaggggccaggcaacaccgccgatcccggttcccgcgaggattatgcccatggctagtccacggtgcaatgtgaaccaggtcggtgccacggttacagatggcatgtaagttagacacgtggccataccaagcagaatgccttgggtgaggatgaattgccacaggtgttgactgaagcttgcaaacaacagagcgcttgaatgaattattccgctagcccagatgacatatcgaggggggtattgctttgtccaagctgttgcgaatggcgcacctattgtcatcagtgcgattgagagagtaccgataaggtcaatctgcgccggtgttgcgccggtgaacggggtgtttggctccttcgacatggagtcgtaaagctcttgaaagacaccgaatgcgaagttaattccgcatcctgtaaagacaagtgttgtcgaggcgattatgatgatggtggagtgtctgtagctgtgttagtccacctcttatggaggtggctgcggtacgtacagacgagttggtgagtttgccgggttttctccgtcaaccagcatgggtgttaaagaacgttccatccttggtagtagtataggtcgaatttttgatggcaacgggggtggacccgcgttgaaattgtaagagtgaagatgtatatgaggggtgacacgtaaggatgcacaaatgaagtaaaagagaaaaaagatgcatgtcttttgaaaaagaagttgattgttcttggcgtttaagcttatattaactgtgaacccggtttaaccctaacattctgagtcatcgcggggtatggccgaggctgtcggatttaatatggagagcactactgctgccatgaagataaacataactgtggcgacaggaagtgcagcagaagggtaaaaagacagtaatgtccgagtgaattcccattgaactggaaagcctgaaaatccggctcgggctatgatttagttcctgtttaggggtaaagaatggtacgtaatcgccgttagattcttaacaatatttatatagatcaacatcttaagccatttcatcctttaggaaattaccgcgttatcctttatgatgatagcaatgcgtcgcaatgagggcgaagcttccgtcaagaacagagcaacggactaggacggtttgctgactgtagattcgctgtcggacagattggaggcaacataaattcgtgtgtctaataaaagagtgtgttggctcttacatatggtctgttgtcgtattataaccgcattgaatcgtcccggcgtaatgaagccggtcgacatcctgggtagctgggcgagccatggctggaaaatagcaaaaaggatacataaataatccgcctaaagctgcgatggaaagctatggcaatgtcgttcgaattgcccaaaatgatagacagagaggatgcatttaccctattttacgataccatagcggcatcagacttggtagttcgagcaacatgattaaaaatgtcagatgagcgtatcaatccaattacgggttcgtagacaattgctcaatctttggctccatattcgcaatccaatatgtttttggtagaagacggtttcggaatttggaaatgccggcacactgtgctggacgacaagaggcggtagtgactttgtttcttcgtatcatgaagacaggagaagagagaaaggagtaagagaaaaggagaagggggggttaaaataaggaaagagaggtcagatgacattaaagaaatgaggaaagagcagaggtctatacggcaggccctctggatacaaacagaacagtcatcagtccctaaaatttgggcatttgccccatttatcatggggttgaggtgttagatgaagaggaagtaagtgcaatactgtataaacatccatgaccttcagtctctttcttcttttttcaaccacctgcctctcacctctgacttcttcatacaatctcataccgttctctcctttttcactgaacttcaccgtgatgtcgatctctgagagagaatgccaatgctgcgatggcaatcaaagtcaaccgccaatggcccacgattagtattgaaatgtgggtatgggattgtaaatggcatatcccacagatcccaccatattcaggtttcagaaagtgagaccgatgaagtcaaactgtccgggggtccacttgccatttccttccatgcgatttcagtagggactcacgactgattttgaacgttaatttgacgatttataacgatttgcatgctatttcatcacatgctcaagatcatttagttgctttgtttcctttattctacagtgctattttagatacgaatagtacttactttatactatatagagcaattattattatttcaaggatgctcttgtggggtgccaggtctatcagaagagaaagagggcatctcagcgaaataatcaagatggagagaaaaaggaagcaagtgtaagagtgatgcagccttgttatatagctgctaaccactttgcaaacgttgcagacctcgaacgtctcaatctatgaagaaagcatgcaaacagcatgagaatcatcgcgagtcaggtctaaagcaagtatactactggttcatactctctcattggatactaccttacctttatcaccaccttcatgagctatgtactaacttcttttatttggacaataagacgaccaggcattgatcttcgactatatgggtctttggtgtcttttatactggtttttgtactacttgttatatggttttcaaatcgaatatgataggcaagttatatgcagccctaaatgtatacaacttacgaggtacattccatggaaccttccaaccctggttccagggttccaatgcgagggtggatgactaagattatgcccggcaataatgtccaataggagagttatgcaccggttaatcgcccggaggttatcattcggcgagggctcccgatttaccccgcatattgtctgataagagataagcactatgttccgaggtccacatgtctcctgtctaatgttctcttgactttcaccagactcttctggtatttacctgctctttccatgacccccgatcgagaactaaatcagggtactaagcgtaagcgcggggagcggagacgcgccttcttggcgtaagtacattgctgctcggcatcatttcgcttctcacattgacaatcctcaaaaagttgcgagacatgtagaaaacaaaaggagaaatgtgagggcggtccaccctgctggagatgtcagcgactagggcgaccgtgccatttccaaggccagccgacccagatagcgacatccccctgctcctcaaccgtccccgtcgcgtccattccgaaagaccagagtcggcgaatacaaagcctggaggatatcgcccgtcattttcttggggatttgcctttagatgaggagaatatcgtccgtatcgcggacaaattacgaaactcgacgaacaccgtcctgccggaaactgccctggatatcaacgagtcatttgacgttcagttcgtgtcagataatatggcacattactcgggggagttttctcactggaatttttcccagacattacgccgcaaaatgagctgccaaatagatcagtttgatttgagggtttgtatctctccccgcaaggactgaagcgtgtctaatgacgtacaaaaggttaaagaatactggcggccaacccagcttcaatccccaccagaagtgatagtggagacattgacacatttaccaccaagagctattgccgacttcctcatcaccatgtttttcaaatatgttgaggtcaactccttttacatggaacggaaatggattgaagagaaggtagcgctctgttacagtccgaaaactacatatacggccattgatttcccttgggtatgctctgtttttgttgttatggccattgggactcaggtagcccacatggaggatgaaaaaccaaatcccgcttcggagatcacggaagaactgaacttgtgctctgaagactctgtcgggctagtcttttatcatgcggcatgcaagctcattcctgatgttcttttggttgcttctcacgaaagtgtgcaggttttcttgcttctcgccacatattcattacctgtttcgacgggtggccttgcatatacctattacggtcttgcaatgaagatggcgattcaaaatgggatgcatcgcaaatatcatggtggtaactgcgactccagaactattgaagtcagaaatcggttattttggacagcatacactattgaaaagtacgatattcaagagggcatttcacatcaaagctaatcaatgcttatagatatatcagtatcctccatggacgccctctgtcgattgcacgatcggaaataaacgcggatatgccaagagactgtcccacctttgagtcaccacgatttgccaatctaaccgcgttccatacattgatttcatacttgggagaggtctccgagacactgtaagtggctcaaaatgtgaaaccagttcatcggtgacatgctgatacctcaatagtgcacaatttaaaagatgtccgaaaaggcttctctctgaatatttagagcgactcgtacggctaaggaccagtatcaagcaatggtgggactcacttccagccactgaagaatgtcgggatctatgctcgcaaggcccgaatttccgacaaaactcgcatctccgactgtgttatctgcttatatatgtgtacatgggccgtgcattcatattcgttgatgacaggaaacaagcagatgaagctataattggtccagatcaagattcaggacgggcgcatcggttagttttggtggacgactgcgtgtcgagtgctttggacattcttaacactctgcaatccttatccgaccatgttggtctttgccgcgcttcttacaatgaattcggtgcttgtcgtgcggctattctggtcattcttgcagaatgtctcaacgcaggaaagtgccagagacttcaagatggcctacaccgtggaatgagtctcatacgtcagatggtcggaggaagctcttcgaaatccgacatctcatatctcgaatctatcgaagcagctatcagccggctagaagccatccctgaagaaggatccatttcccatccacaaagcgatgaaagctctatctctgcctattcgaagttcaaagactggacgcagtcactgaagaaggacaaatctgcaggtggaaatttggagctgtcttcttttagcccgctgtcgcatctcacacctagcacagaacttttcgcggacccggagctgaatgatatgacagctttctttgagcctcattggtctaatggggatttccagtttgatgcgtataatctttcatctctgtcaaattgattttatatggaggcaataaaactaagattctatgttactgcttcccttatccaaacaccgcatactgagcacgttttctccaagtcttctgcatgtcattctctggattccgctccgcatcttcggtcgcaatagcattgataaggtcttgttcatcgaaggctctggcagggccgaaatccatgtcaaccggcttgactatcttcgttttgaaataccactgtcaaagtcagacatcttccatcgtcaaccaatttttaagctctcaccttgtatacgaagtaatcaaagacgaacaacggagccgcgagataagaagagaagaagctcttcaccgaacccttttctccaaatggccagcaagccaggtagaattcacaaccgaagacaaacgccacaataaggagactaaagtattgcgcccatggagtgagaagacctttgaacggaagtgcgctgagatccttgttttgcgctcgaagtccttgccggaagcgaagatgagcaatataaatcgagccccattggaaaagcgtcgctatagccacctaaattcaagttgtcagcaacttcacatattaccccttttgccgatgtacttaccaaggccgaaaaccaactatacaccaaagtgcccacactgttgcagttgagatagcctagcccaccaccaaggcccaaactgatcaacagggacacatagggtcgaccctgcgagtcctttcttccgaagaatggatgaatgatctgcaggtcagctagtgctgtcaaacttcgacttgcgatgtaaacactagtaatgccacagctaatgacactaaggaagatgaacccgttgatggcgtgtgcgagaccgtaaacatccgcccgcttgactgcaatgacaaaggggcttcccatagtcccgctggcgttaacaagatccacatcattggagggaacacacattccgacgagccagatgttaaccacgaagaaggtaaacattctccagaaaacgggtcgaactgtctttttgatagtgcgacggggatcggctacctcgccggctataacagcgatgtgctcgcctagcttgagttagtatattttcctcaattcgagctcggatctcataccgccgccgaaactgaaggccgcctgcacgaaagccttggaaatgccctttattccattattgaaagcaccggggttcttccagtatcggaactcgattggtccgtttgttgctgctattccgcccgatgtcatgatgaacatgaagaatatcatcaagataactgcaatacacttcacaaaggacatgtaatattcgatgtagccgtagactcggacgtggaacatgtttgcgatggcaaagactaccagaaatatagtgataaatcccgcgagtggcacaacgtctgtctgtggccagtatttcaggacggatatcgctgctgttatctctgctgggatgatcatcacccacttcatccgcgttagtacatacgaccttgatgttctagtaggctgacataccgcaaaccagaagttgacaccaatcgcaaagccgaatgcggggtccacatattcagcgcattgtcggataaagccaccatgaataggcttgtatgtagtcatctcgccgattgaagagtattgggcgtacacgatcatcctgcagaccgtgttagttacaagagtacaagagcagatttctctggagtaccctacgctgtgatcgtataggtgattgctataccggcagggccggctatttattgtcaatatacatcttgaagggaatatcggggtttcaatgctcaccatagtgcaatgcttgtccagttcccacccatagaccagtgccgataccagctccaaaggtcatcatcatgatctggcgcctcgtcaaggaacggtggtacccagcatcgtccgacgcagataggacgagagtattgccatgatgctcagttcctgagctggctgagcgttcgatgtcatttgtctcgtttgtcttgagctcaattgcgtccttcgaggtttgcattgaagattggttcatgctggtgcctgcgtgagtcgtagatgtgttttcagcaacgagaaacctaccatctgtcaatttatctgagatttctagggttagttcccgaggtcaactgtatccttatcgctatctctggtatctctttaaagtgtttacattcccggcgggagcaatttcgcacttcccgccggcactgcactgctagtgtctttagggctacggagtacatgtacatacgcgagtaataaccggacctttacctgtaattaccagtatgaggaggataatttgaattacgtacagttcaagcctcgaatcaaagcatgctatagatataagataggcttaactattcaatatcatcagatctagtgttttggattcctggaaaaagtatcccctttggattgcctcatcgatctgtcagttgcattgaattatgttcccaccttgtgcaattggaatctgatacgatggaacacaatcggaaattgagagtacaatgcctctttaaattcgtcgtctcgatcatgataatgataaaggttatacaccgcaatatcatatcactggggtgtcatacgtagaccagcttcatcgacagaacactcgtgaaagaaattgctgagacggttatagtaacggcctatgtactctttaggctcttgtgtagtaagcttgtagccgttggcccatgatgtagtttttagggtcggaggtatcaagaagagcctccagcagaacctgactgactcaatcaggggtgtcgcagagatcaaacgagctccccaggatgacaatggcagtctgtgtccgcaagaagatatacagcactaagcccgggagacagatccttgaataaactacaggggttgtcatctgattgacgcttgcagtgtgaaaggatgagtgagatgtagctgaatccatgtatcctcaaaggataaacacaatgctatatacacactgattgaatgacttccctagtgaaatttgatatatatctggatagtactggccaccaaaatctgggaatatataataatacaaccatcttattcgtaatgaactagtaattgtatgctaattaccaacagtttctaactaccagatactactaccaaagtacaatctacatctgtacatcgacaacctcacaatccgaccgcgtaaccggtgcggggtattatatgattcatagtttcataagtccgagataagttcaacaagggtgactcgctactatttatccaatctacgcccctgcctttctttatctgcttgaaagatcatttcgcttcaaaaaggtgctggggataacgattgatactccaaatccccaacaaacgactccaacattgagacccaaccatgtcctcatctaagcacgttgtcttcgacatcgttggtactcttgtctcatacgataatgttttcgacgccattgatacccgattgggagaccgattgcgcgcagagggaatcaagccccgtctgctgggatttacctggatggaagcagccgagcgcgaatacaccaatctaagtcttgcccaaagctacgtccccttcggtcaagtcttccgcaccctattctatcgtatgctctggatggctggcattgctgagccacggacctgggcttcccccgaagatctggagtatataatggcggaataccaacttctcaagttccgtccaggtgcggcagagtgtgttcagaagctgcgtgatgcaggctttaccgtgtgggcttttaccgcagctgatatcaagcgtgttgggggctatttcaagaacgcgggcgttgagctgcctgcggagaacttgctctcttgtgatgacgtcggtgtgggtaagcctgacttggcggcttatcgtcctttgctggagaagctgaagtcggagaatgatgggaagacgccttggtttgcggcggcgcatatgtgggatgtctctgcggcgaggaaggctgggtatgtgtctcgtctttgagttagaagttgctactggttattactgacactttattatacagatttaagggggcttactgctctgtatgggagaaggagtctctgtcagaactttttggagaaatggatgttttggacgagactttgccagggatggcagagaagatcattgcccaccaggcgtcatcttgaaggcttgcacttagtcttaattacatcaacctgaatagaatgcccttttgttaaacatatttgtcccgcgtatatttagaagttagaagtattaagccattataaaaagaagtatatagctacagtaaacattttccaacctcaactctcaacaaggttgattttaagttcacacttctcttttttatctcccactctaaactcgaatcattcaagtcaactcctcaaagtattattagataccgccggacaaagcgttatcactgtacgtccgatgttaagtagccgggtcaggaccgggaaagttaccggtggaaaagccgccgggagggaaacacctccccagtcctcaatgccaatgccaataaataattccgattcatttgtgtttcctagcctacttccaagcccgctaatagccttggactctccaaaatggaatcgaagcataccccagtcccaaatgggatgacgtcattctggcggacagagcctcactttctggacagccatcgatcaaccgaatctctccctcgggagtgtgatatcgtcgttgtaggagctggatatgcaggagcatctgttgtgcaccatattctcgaccaacttagccccgggtcgacgccgccttcgattgtgattctggaggctcgacaggcttgttccggtgccactggtcgaaatggtaagattggatagctaagagtgataaactttgctaaaatatttctgttctgcttattgtaggaggacacatgaagccggatgtttataatggtatcgctagcttggccgttgatcatggtgtcgaggctgctgctgaggttgccgctttcgaggctaagcatgtctcgtttctcaaggagttcgtcgaaagagaaaagatagactgtgaatacaccgtcacaaaggctatcgatgttcagttgtctcggagctatagcgcaacactcaagaaggcatacgatggattgatcgagaaggggtgtgaagcgaccacgaaggcaaaatatatccccagaaacgaggccgagaaggtgagcacattttcgaaatgtcatatttcgatatactgaccagctatccatcagttctctggagtcaaaggggcacaaggttgtttcacatatgacgccggtcacatttggccatacaaattcgtgctgcaccttctggaaaaagcaattgcggaaggtgtaaatttacagacgcacacacctgtatctggaattataaagtctactccctcaacatccagccatccttggacagtgaatactgcccgaggttctgttgccgccaagacagtggttctagcaacgaatgcctatacttcgtctctagccccgcaatataaggagaagattatccctgtccgaggaacatgcagccgaattgtcgtgcctcgaggttctaccgctcctcctctgacgaatacttacaccctgcgctggaacaattggaattacgactacctcatcccacgcgccgatgggagtatagtcgttggcggtgctcgcccggctttcatcgatgatctagacagctggtacaatgtcagtgatgacagcctggttcttgagcctgctgtccgatactgggataattatatgcagcggaactttgtcggttgggaaaatagccacgcttacacggacagggtctggacaggaagtacgttgctcaatctatgatttccctgcgtgtaccactgaactgactcaacttctctatagtcatgggctattcgtcggatggattaccgcatattggccttgtcccaggacagaaggatcagtacattatcgctgggttcacgggacatggaatgcctcaaattttcctggcggccgagggcttggcaaaaatggtactcaatgatatcgattttgcaaagactggactcccgcggctatttgagtctactcagtcccggcttgatagtcgccagaacaagatattcgatagcacccccggggctgggaaaccccaagcaagactgtgagcaggattcaaattttagatgcaccactactagcgatttaatgaggtacatatacacatgtctttgtattgcatgttagcataataaatagtggtggatttttattttttattccgtatagaaccttccaggtttaaataccagctacctgtaagcgaccactcggggtggtgacgcatacgggttatagtttgctgggagtagacgaaccaaagcctgtcctaatgtgacctaccgtagggggtagcctaggttctatactctatacaagcctttaggcattcgaacctacccagcttagtggctacgccgccgnnnnnnnnnnnnnnnnnnnnnnnnnnnnnnnnnnnnnnnnnnnnnnnnnnnnnnnnnnnnnnnnnnnnnnnnnnnnnnnnnnnnnnnnnnnnnnnnnnnnnnnnnnnnnnnnnnnnnnnnnnnnnnnnnnnnnagccttccgcccccccccccccccctcccccgggggggggtaggcggtaggggtagacttatttgcttatttacttacttgcttaaatgacctacagccggcttagtagctacgccgtggtttacttatttacttacttacttacttgctttcttaaatggcctatagccggcttagcggctacgccgcggtttaattatttaattatttaattggttgattgtttgcttggttaaagggtggctacgcaatcgccgccggtatatattacgtaatcatactatacagtcacgtgccagatgcataatgcatatatatcacgtgattagccctaccctagtcacgttactaccgaatttttgaccaatcagaagccatacatgagaatctgagattacgtaaatcgaagtaactaacgtaattcacatacgagccgccaccacatacgacccgccaccccattcaacaatnnnnnnnnnnnnnnnnnnnnnnnnnnnnnnnnnnnnnnnnnnnnnnnnnnnnnnnnnnnnnnnnnnnnnnnnnnnnnnnnnnnnnnnnnnnnnnnnnnnnnnnnnnnnnnnnnnnnnnnnnnnnnnnnnnnnnnnnnnnnnnnnnnnnnnnnnnnnnnnnnnnnnnnnnnnnnnnnnnnnnnnnnnnnnnnnnnnnnnnnnnnnnnnnnnnnnnnnnnnnnnnnnnnnnnnnnnnnnnnnnnnnnnnnnnnnnnnnnnnnnnnnnnnnnnnnnnnnnnnnnnnnnnnnnnnnnnnnnnnnnnnnnnnnnnnnnnnnnnnnnnnnnnnnnnnnnnnnnnnnnnnnnnnnnnnnnnnnnnnnnnnnnnnnnnnnnnnnnnnnnnnnnnnnnnnnnnnnnnnnnnnnnnnnnnnnnnnnnnnnnnnnnnnnnnnnnnnnnnnnnnnnnnnnnnnnnnnnnnnnnnnnnnnnnnnnnnnnnnnnnnnnnnnnnnnnnnnnnnnnnnnnnnnnnnnnnnnnnnnnnnnnnnnnnttcctactatatataataaagtcgatagtataaagagtttctaaagctagcgaagtctaattttatcagaagtccaactgtttagactaatttcaaaacgccaattatttagaaggccgttaaaccaagatttaataaagactttacctttaaaaatcatatatagaagaagcgcctaccctactgtatttatatattcaattacagtcacctactcgcgatttctaggttataaaagtaatctctaactataatattcacttctagttataacctttgctattacggttaatcctatagtaaaacctatcttattgaagttataaatatcgtccggatcgattctatactaaagaatggttttttgaactagatcaaaccactctctaataatccttaggtctttacatttcgcgcgctcgtaattataacgtcttaagaatcgggatataagggtagggtgctgtttaacaaaatgtataacctaattttggctaactgaaataaccggggtagttccgcgttgtttaagaagaagatccgccatttctcgtacgggttggtattcgaagataaatattcagttttgaaaggacccgatcaggtaaaaagggtactaaaccagctgctgagaagctgtttttaattatctctaatttaaaagctttaatttatacggtagggtatgcttcgagaaagtcgagtttattaatatagttaatcctgttctgtattttcgttttaattaaccgactatatatccgttttaagactataaaacagccgatattaagtagttgtaaaaggtaagaggaatacagtggtatacaaattggtataatatcgttttccttataaatttagtcgaattaaggggttaaatggcttctataaccattgagtactaaaagtcgataccttcctactatatataataaagtcgatagtataaagagtttctaaagctagnnnnnnnnnnnnnnnnnnnnnnnnnnnnnnnnnnnnnnnnnnnnnnnnnnnnnnnnnnnnnnnnnnnnnnnnnnnnnnnnnnnnnnnnnnnnnnnnnnnnnnnnnnnnnnnnnnnnnnnnnnnnnnnnnnnnnnnnnnnnnnnnnnnnnnnnnnnnnnnnnnnnnnnnnnnnnnnnnnnnnnnnnnnnnnnnaactaaatcaaaccactctccaataatccttgggtcttcacatttcgcgcgctcgtaattataacgtcttgagaatcgggatgcaagggtagggtgccgtttaacaaaatgtgtaacccaattttggccaactgaaataaccggggtggttccgcgttgtttaagaagaagatccgccatttctcgtaccatagagggccggggggccgatccacgagaatccatagagattatccattttcgaagagattcctcttcaattgcggtcaatttagtcaagttggcgcgagaagtcgcgcggtgttgtataccactgaggcggtcccgaagggttgaacgcggtacgttaaaagtgcgggcggtagtagaaatattggaaaattcttgattcttaaaagcctggatagctaataagatcctaccctctttctctattgaatctttagaggattgagagcgttttggtggcatggtgggtggttgaattaactaggtgctaattcatggacgcgtttttggatggggtggcgggtcgtatgtggtggcggctcgtatgtgaattacgttaactaagatgttggaaataaggtaatcaagtaccagcgtaccgatcaactcatccttcttgtgggtgctctaggatattttttatagcatacttttgacttaacattttaacgttcctcttcatgttatagaaaatatagtccagcgggattaggttagaacacctgccaacaaacggagtaaggactaagcaggataatgtttccctcgtttcaaacaccccatgggccttattctgccggctgggccattctgccaaatctcaccgtacagcttttcgccgccttgaaacctagggaccataagaaaaggcctatcacgtgatacgcacacgagcttcgctcccttttttacttgcgacacactccccgctaaactacttcgggtatatctcccgctggccgcagtttccaatcagctcgtgtaatttactatggtatccctagagtgattgtaaggtactgtcagccatgaagctatttagagattatctgatctatcgaacatgaagctattcggagatcacctcccttcgtaaagtttaatgatcgaaaaatacagcgcataacaaaaaccaaggttcctgtttaaggcctaggggggccatatcgcagtctgatattcaattcttaatgctcaaattctcattctctatactgaatctagcctagcagacaagatgagagcgatacaacaacccaaaggtcagctagagttacagactatggagatcatcctcgtatcctaatggaatgacattctgtaaaacccttgtcattctgtgtctcttgtcatccattctcctcgatcttctccgtctctcttctccgttgatttctctctgtggtatttattcattcttccttcattctttgttatgtctcaactggatgttttcctcaataggaaacacggtcaggatcttgccttatcctgcaaatcctcgcattgagagctgaccagttaaccaaatattgataatggccctccgaggtggctaaacaggactagatcaaatacagagggggcattaagagaaaagcgaaagcataaaaccaaccgacggagaaacagttcaactcagactatcaattcaaccctacgataaccgatcgccaatatctcagttttcaccttccatatgtgtatattttctcaagatgagaagatggagccgggcttacattgaccagcaatctcagggaatcagttcaaccctgggagggaagtactcgaacgattgccatggtatcgcctacatagcctttgtgaatctggatcgacgatatgagaggcttatacaatacttggagtgacttgagctttcaaatacacgcaattataacccatttccctctaacattagtgcatgcattctttatgtaacttccaagctcgttgttggaggagagtaggaacaagctgtaggccgaggcgaaaaaatgaactccagggctccttcctcgtcagggaacttttttctttatggctgaggtcacgttccaattcccattcattttactcttcccctcgactcctcttccctttcgactagatctaagcttctggaaccggtcatcactgtactcttgccactgtccaccgatcatcatcagtgcttcagttccatcgcatatgctgtttctctacttcttattggcttctgatcctctgacgaggttaggtctctttttcatctcacttctggccagcctgctgccgttcgaaatgagctcaaagctacctccccgccgcaccagggcggatcacaatggtaagctattatttccacagccccccgtgtaactgacatgagctgacttgagataaatcacacagccgaagagtggtgggcactgcttgagattcccaaaaccgaaaaggaatgggaagacgcagcctcaaatccatacattcccccgacgagcgctaagagcgaaacagaaaagtcaaagggcaaagagccagccaaaacgacagataagccacaaaaggcacccgatccgcgccatgggaagaggattagggacctacatgtccgagaaatgaaaggctgtctatccgcatctaagattggcctcccagaatacctgactggacgtatcatatggcataaggctaaaatcagcgacctctctatcgatgaaaaccagtctaagccattgacagatgttcaaaaagggctaggatttgagaaggaagccagacagtttgctgcaaagtaccaagcgaagaatacagaattcaagaagtactataagcatattaagaagtatggcggttctctccgtaatgatgaacgccgttgtaccggtgagtacgccctcgtccgtgaccttcaactcaatatcattcaacggcccgacatcgaagatcaacacttgcgagagctttccgaaaaagctaggatctgcgagatgtgggcgaggtcgcaatgcaaaaggaaagtcgatttttcttgagaccacaatccgagcaaggtgacatggacatggaccggaatgatcaggagtctgatagacctgccaagaagcagaagaaatcagatgaagatggtagattgattctctacgcggatggacaattagtcaaccctcagaacaggaatgacatccattgtattgtggaggtcaagcccaatctcttccggtccaaagatggctatgagaatttcctgcgccagatgggctgggagatgctgttttggattgcgaattgtcacaagctgaacctcatgaaaaaaccggtaagccgaaattccgcggcagctaatgcagaacgctaatcaaagatacagatggatcatgatggctgaatgtgctgatgaggtttacctggtcatcgccaggtttgaacagccgtggcttgactatatttccggagaagatccagaggacaatcagcctggtgacagctttctgcatctctatcttgcaggaccgctgagtgtgtacaaccacaaacatgtcaagctcttcggaaagtttgtggtcactttcaccatgcagcaactgttggatgcgtcacgttgatcaagttacttcggcgcagaacattgtacccggcaagctttctcctcggctttctcctgttttcttctggggtttgtgccaagaacctcgatttctttatgaccgcaggagatttcatcgcgctgtttgagggtgcagggggtccacggctcagcggtccacgcgctagttcaacatcggccagtttccagcgtctcgactccggtcagtcgatcgttcagcggagatcaaccctccccgcgaaccgccacttcagtgagatttcggtgattgtcgggaacgagtcatgctcttgctcgcttgacagtccgtccgaactctctatcggtattgtacgcatctgatgactggtggggggatagctagactccgtcgccactacatagttgccccggacaatttcattgctctaagcttcccgttagcatcaattcgcttatcccaagtaaattaattatgtctttaacacttacactttcatcgtcaaaaataaaggcagaatacgcggccgactattcttgtggtttcaatttaaaatggagcaaaggcatatatcgattatgcagaaagcagcaacgtctctctcctcctaatgtcaatttgaaccacccagaccaaacataataatatggagccatcattgtagcaacatcaatgttcaccgtgtcataccctggcccatcacagctcattgccctcattttccatgttttttgatataatgggcaatgtgagagtctgaacggtgttcatctgtgccagaggccatgcccaagcaaccaaatcgctcatcaattcgccataccatgaatcattaacccattcccgatccaaaagatcgccgtaattatatttatctgtcgtgcaccattcaaagtctacggactcggtgaaatggactttcagtccattatcgtagtacccagatagtacacgggcacgagtgtgatcatcgaacgtgacaattgttgtctggctttccttagtattgaaatatgcaatatcagagggaatactcacggggaaaagatggtgcaactggatgttctcgtcctgcgatgtaccgacacgtcttttttgggagttcattgctttcaacattcgagtggctagcactaatagctcggtaatggatggtcggttctcatcagactcgtcaatcaacgccacagcccattgatggcattgaagaggattgtttctgtttcctgtgcgaacaattttgaaatcgtgatggttctcccgggattcgaaatcatagggcattggataactataaagactgtcagtgagcgatatgatttcgtttttcaagcattcccactgactgataaacattccattcatataccatccgggcttcctcggcctcatcgatctttctttgcctctctgcgatctgtctccaccactcttcctgtcgtttgcgccgctgtacttcatgctcttcactctccttgtcactttcctcgtcactatcccactcactacacatatcttcctcgctctcctcagaactctcatcaaccccttgaacgctgctgcgctctttttcgtcattattttgctcgcgcatctcttcgtcagcctctgtacttttttcatcctcttggtctttaggtaagtatcgattgagccatttgattgctgtttggtagtataagaaggccgacatcaggtaataagatggtagaggccggcgggtggaccataatccccattcccatcgccggctcacaaagggctcttctcggattttctcttgagtaggatctggaacatgttctgctccattaggtgcaaagtaaggagactcagaacctgtcttcagatccatttcagcgactgagatacctagatgctccatagtttcgtcagtaatggaagcaccttccatcttccgtagagccgcatggatgtctttcatatggtcatagctgtgattgaaacgccgaagcagtacttcagaaatagagaggtccatcattttcaatgagaattcaagatggtgtatcgttcaatcaagtagattggaagagaataagttaagggaagagagcaaaagaagactttatgtgcgaagggaatagtcgacgtgacgtcagaaagcataatggacacttgctcaaattggtttagtactatcgaattgtaccattggtcatgagaatataaaatgggttggtccgttctcgaaaatggcgccggagctcaagtgactagtactactggcccggacggttagttaactagcgaattccagacgaagcggtcatgtgataactataaaagcacccctggtgcacaaatccaattaccttcctttctactagtagtcatcccaagtgttgtcctctctagcaccctactattcccagtgaacaactttactttcaccctgtttcacaggcagggcggactgtcggcacccctgctgcctccgttgtagagttccctcttcactagctatatattgaaggtacaggtgagatagcgtggtatatagacaattttatcgtagctacaccaactaaagcgatgctatacctaagcctaagccttaaataggtaccttggtttttgttatggactggtggtaaaatgcgctctatattttccatcaaaccttccagatttcttagaaacatagtagttttccataccaatgaaatgaactgcttcactcagccagtgaagtgagagatctgtgcaatctaaggaaagcattatgtttcgtattaatctcgaaggccatggcatggctaatgaatagagtgatgttgaagatacgctgcttatgatgtttcagcagctgtgcttgtaatacctggcataccagatcggcagacaacattcctttatagttacatctgtagacagctttaggtttccagagacacaatgactgttcttctttttacagtgagatctttcacatatagggaacgagaactcagattatagccatcatctgacagtagaacaaaacatgtcaaacttcaaccctaaaaataaaagtaacagcagtctagctttcattttccgcagttacaattctgaagatttcatttgcgacatgtgggccaagaatgtcaagcgagccaatgctcatcatctccagcatcggcatatcaaaagagaatacttgcttaattaaagcgcgtagctcgagagatggccatggcgtcaatgacatcctgttccagaacaggcttgaagccactgcgctatatctcgcccatcataccctggtgctccgaaatacagccaacgtcttcgacggctcccatatcaaggattgcatcgtcgccagcgagaggaacacgccttgcttgatatccgagagacgcagacagctgcgaggtaacgacttcgaaaaagaggctctcagctgggtggttgtaggctgatccataagcgaagggaaagtagagttcgtacttcgagtaggtgtgttctgtggataggacatcggctaccacttataagatcaattgtagtcggggtagggggaattggtcttgctgaagcaccatcttttatggtccgagaaggacccaatgaagccatggaaaaatcaacaattctcaatattctgggccgagctgcaccgaaaatccgaatactagttaggaatagagcggaagtacgacgtatggagtggtaaatggaatagtattgtagataatctagaagtgaaacccccactacgaagcgtccttttggggggatttgatgcctggatgccttatcttagagcggcagaaattttaaatacctgaattaccataacagtagaaaatggccttatttctcggcatttgaagccgtctaccaacgcttaatctggccgccgctcgaagtatccctcgaggtaattcacacacccttacattcctattccgtcgctgaccctgttgttgtcgcagccgcaaaactaaagccagtccgtcgcaagcgtgctagatctctagctatgtactactcctgcacctcagcggagacggaggatttgatcccctctacctacctccctcccccggttttatgccgaggaagaaagaaggaagaagagaggagaaggagagaaaaccaacattaggggcttttatatatcaattcaagtagaactttttttggaactcaaaaaccacccagaaacatagagatggcgaaatttgtatgggcccaaaggcttcatctttttaaacttggaattaaattttacaatacattggaaagggcggtgtcgaaagcggtgctaaaataaggcaaccaggcaccaaatccccccaaaaaatgagttttgaaccctgagcgctatcggtcttcgtacccccactgcattagttataaaagcaccccagaggcggagatagcaacgcagacggtccgtacggagtagctagattatggaccatcattatcctccccaggacttctacagatactttgcgtaggattagaagttagaatcagtcgtttcgctctgcaacgactatctcgacggcctcagtattagacttctggcctagtgtgtatatttggaaaaggtgaatgtggctgtattgatgggtaacagcttcaagtaacagctacgatgttctcacaaacatagaatcacagagaaaggagttgtttattcgctagggaaagaagcagcatctcagtccttcatctcttcgtcctcaagttccagccgagccatttcctcaccctcaaattccaaccggatcatttcctcctcgtcccgggccaccgctgctctggcttccgccgccattactctgctttctgctgcctccatctctgcccgatgacgccgcattctggctgctaacagttgccgtcgtgctactctgctacccgggtttcgatacaactctgtgtgtgctgctgtcgcaggaggagttctagaacgaattggtggctgagtaagagtcggtggggaacgggatctggaccgagcagctggcggaggaagttgaacccgcgactgcaagtctgggaatggatttagtggagtcgataccacgctctgagcaaacgtccgaatggaagggtcatggccaagagaaccagagacactatcaacgtccatcatgttcgaaatcgaggtggcattgctggaagttgcagggcccgcttgttgctgagagtgaacaatgtgccgattgcccttggctgttagaagtcggagagtgccggcaaagaacttgttatgcttcgatcttctctcaatgttctgaatgacattctcaggccagaggcgcgcgtttcctacaacgacgatagctttctgagcccggctcaaagcgacattgagtctatgctggtcggcaatgaagcggacctcctcagcaacttcgctaggcttcgtcagcaggacaaccacgatgggcgcctcttggccctgcgccgcgtcgacagtcaaattatcgcgatataaacagccgcgctcggtctccgccaaagtggcggctacaaggttccgctgggctgtgtacgggctgatgatcatgacatcggacgggccaatttgctcgccttcggtggactggaaattgtacagattttccagcagagtctgcacggcttgtacctgcgccatgttcgaccacgatgtctcattcgccgggcggaaggcgacactgtccacggataggaacaagcgtcggctgccaggagcgacggtaggcatcgcatgcctggtccaagcatcccatgtccttcccactcgatccaagtggttgacgttgctgcctgaagcgagctttccactgtagattgccttgttgaacaactccaggatctgcggatgattccggtagttggtcacgagcgtctcctgggggtagcccgcttccatgagacgagacaggagggaccgcttcaggaactcggagccctcatttgcaccgtctgaaagaacagtcggaggcaactgccgggggtctccgatcagcacaatgacccgcattgattccattgtcattggaatcatactttctccctccatgctctgaccggcctcgtcagaaacattcacagatggtttgaagtctgaaaacttcaaacattcttgcgaggcatttgacagagttgttgctacgaccttgcttttagccaggaccgtacacacaatcttgccgtagaggctcttcagcttgatgacatcctggaggttgagtgggtggttatcactggtgtctcggtcacacagttcacgaagctcaacacactcaggatcattcggatgctcagcgatatggtcaaagaccagagagtgcatctggatcggttccatctcgagatccgactgacttatgatgggctgccgccgtagagtgggccgttgattctggctctcggctcggaccgccgacatgtggtatgatggcgtgcgaaagcgaacaacctgtccacaccaagatttcaggcgactatcccggttaagggcccggatcagagccagggtgaggttgtcaacgcctttgttagaggcagaagtgagtaacaccttgatctggagcgccatcatggcaagaactatggctaccgctgtggtcgtcttgcctgttccagggggaccatgaataaggcttacaccgaccgtgatggcggtagtagacttggtgaatgcctcttcttgtgttggatcgaggtggcagaagttccgaacatattggaggcgctctttggcaatttgggagggaagggaggagagcatctcgatggacaaaatgaagtagtcaggactggtaaagttaagctctgtgccatgtgcgaggatagtccgactaagtgagaatcccagtccatggttttcacccttgtcgccatatacgagcgttttggtacccgccgtagtcaatgccgcgatttgttgatcgattggaagggtatttggcttcgtggtcatcacaatctttcgctcactttcatcagtccagtcgaggtgaccatagtagtcaatgatgaaatcacctaacgtttcatcatcgacgactgtgcccttgtatcccttggccttgaaatcaccctcggtaacaggctcagctgctgatatctcgtctagcagtagaaagctgacggatgccattgctgtcagtgtcggaggccggccctcgcaattcaatttgacgtgaatgcggtgcctcataccgttgcctgatatggtagtgatgattgcgcggtgtcgagtgttcaggttgaacacactggttaccaaatcacgcgcaaaagccctctcaacgtagctggcttgaaccagtctgctctgccgatcgtggtcgttgaggaagtagggcccagggagttgccacacgatggaaggcttgactccgcttggatcctcaagccactttggcactactcgcggctcttgattggccggatgtttccggtagaaccagaaagcctgtgggggggcgagcgttgcgggatcaatgcttccatacggacgacgaagaaggctgttgagagtgacgggatcggtgtcgccaaatggcaggcgaagcaaatactccagcccagacattaacttccaccccttggaaaggaatctccaagctgggtcactccactgaccccagagaatcaagttgtcctggacaccaagaagcctttcccagtcctgaagagtagaagggctagcattctccggtgggaagccgatgacgactggcggcctgcgcatgtggactttgacaaggtatgccgtatcccaaactcgttttccatctgcgaagattcgcggcaaggaagctcgatactgacggaatgtttcagcatcgtccagttcaattccttcgcgggcaaagtggaagtcgcaatcctccgcggtaaagatcagaagcccgttgacacgtttgccaatgcagatctcgagtctgggctgctgtgattctagcactaggcgggacttcacgttgacgaagctatccccgaatgagatcacgctaggcttccattgtcgcaactcgttatcaccctgggtatcgtgacccataggctggtcaaatcctcgtgcaaatgcgttgaaatccattgctggtgattgtcaagaccctatgagagtagactatgttagccagttgatcgtgagtaaacgagcgaggagcacggaaaacagactgacctcgtcagaggatcagtgaagaggagcgaggagaggagcacagaaaacagactgacctcgtcagaggatcagtgaagaggagcgaggagagcagcacagaaaatagactgcccttgtcagaggatcaatcagtagtggaaaaatagaggagatggaggaaaattctctgcaggcaaatggttctgggagaatgtggagggtgaagatgtgaggaagataatgttgggaaaatcactcttgggatgggggtatgactacctaccttctacacgtgtctaggcacgtgaatatctcagcaattcgttaatcgatggatagctatgaggtgctcccattaccaacagactcacctgcatcaaagtgaacagatggcatggccaacgaacggctcaccaagaatgaaacaacaagcgaagacgtttcacgatatctctctaatgcagttctaggtaccttgtggccacatttccggaaagttgacttgggagatactgttctggattgcgagttgtcacgagaaaaactccatgaaaagccggtaagcagtaatcaatggatactaattcatgatatagatggatcaactatggcataggattttcctcagtcggcccattcttgcacatggtacggagcttgataaccagtcctagccatttcgttctgtcaatcaagccactcccctcgattctctcccacgttgccaaacagcgcctccaatatgtccgggacttcgattcaaaccaacaagatgatgcatttacaaagttggtcaataaagcgattcacaacggtcggcacactccaagcagcgcgaactagagcgagtcggaaaaacatgggatacttggaccaggagtaaaacatggaggtcgaggtattttcccctgtccacatcggcacctggcgctggcagtgaggttcaatggtcatcagcctcggttcattgcaaacaaagagagactgaacttctctttgagtctcgtcattgttcgcagcatgcctttagcccgagcatgtgatcaagaatatcgagggaagattgaattgcatcaagcctaattgtgtcgttctccgattgatcgcggccaagggcaatcgccaaattgttcactctcagttgcaagcgcccccggcaacctcgagcatttcctcatatttctgagctgatggacgctatcctacagttaggacagtggggattcgaccaatgacccagaagtttcaacccgttcgttcagagaatggtattgagcccaccaactcgcacccggtcgtcaattcgatctaaaactcgtacgagaacagcacacgcggagttgtatcgaaatccgcatagcagagaagcagaacgtcaactgttagtagttagaatggagcagagacggaggcagctaaagccagatcagtggctgcccggtatgaggagaaaatcagctggaactagaggacatggatcttgcagccaggacaattctttttcgcgtgcgataccatgttaatgaaaagatcatgtcacttttcctctgtcgttgaagctgttaccaatcaatgcagttacgttggttttctcacactagaccagaagtagaagtgggccttccggcagcaattttatacccggcccttgccaagtgctcctcgctcaacttacaatcacaggttgtcccccaaaggtggcaatattagatgtagacgatagcgttctgtgatagatcacatgctatgaaatatgaaagaaatcagggaatgtttgttgaattttagcgtcgagttttattttgcccctagttattctatgtacataaacctttcaaaatatagcgagtgaccttagaaggtgactatgcttagtcgggtagacgcgtcaagcggtgacgttgctccagaagtggtccagccttaggactaagagaatatcagctaaccccgcatgactcgcctgaagtcgtcattaatttttatctttctagatagtggcgatttcagtcgatccttcttcggatctcctccgtagaacgataagtggcattcaagcatagaagctcggccatttgttggtcgatggaatcaacggactaccaggtgtttacaaaagctgtacaagcatgacaaaataggtcagacatgtaacactgatatgatatattcttttgtttgctgtggttttgaatgccttcgagtgtcttttaagtgtcttatttgagctcctttttgagtgccttagtttatgtctttctattcctatttcttggtatagcactttagtcagaaaagggcgaaatgataacgctgcccaggtgtgatattcccacaccgtacggtcaagactgacgagccgtgccgacaaagttaaatgagcccggtcttggcgtcttggcgtcttggcagatgagaatgacatgctcttattgtgcaactgtcgggtatacgatgtatcacacaagtactttgtgcgaatggccttgttaccttctataaactcgtacctagcacagcttcttactgtagataatgtgcaacttaatctcaccttctccgacgatcatataaatgccatcgccaatcacaatggcgtgcttcacgcaattccccacacaattgcgcgatatcccctcatttaaggtgagtagggagtagttatacctcgagctttaatatttatatcatgcacctcgcacaattagcttctaatcacttgcattctgcaacctggttcgcctccttatacgagctagatcgcgcctaaggattttcaccctgaaagctcgctatggaagctatcaatgcatcggacgagaagactatggagctctcaaaggatttagaccttgaggccaacacacgattagaatacgacccatggcttctcgacgaccatcccctacgatcgtacccgacagagtgcatcccaggcctgtcactttacctcgacgaatactacgagtccattggaaagcgaagggcgcttctttttcgcgcgggatgccttatcctcggatgcctgtgagtgtttctgtcccatctctgctagacagccaatctgacacattcctccccagagtcgcattccaatgtctccgatggctcccaatccatatcacacgcacgggcccacaccacgcgcaccttcacccccagagtggcgcgtgtacatttccgacgctagacacgcgaccgcaggccctcgagtcgtcgttcaacgagggatgcgatggcctccggacggcggtctggatgcacaacggggagctgcagattggagacgccggtgtggagactgagcacgagcacgtcctgcagagactcggtctcgaccctcttatggagaaagttgctgagaacgatgccaccgcccgggcatccgttgatcctgggatgtcaggcagctttcatcctggtcgggctcggactttctttttggtgcttgaggctaggacctcgcttgacgaattgtacccgcgtctcgttgagcaactcgatactctccggcagagggggtatttgtcccattgggatgggcagaatgttgttccgcgccatttgactgtggtggttacgggggaggcattctctgggagtgactgtgtgcatcattcttattctgacgtgttctggtctttaccgggaccgtttatgattactaaggatggcctccatctctcgccggtatgtgtatagtagcgtaaccgttgttgactgtgatacccaatttgagtttaatttgatgtgcatgatatcattatatcatttccaggattgattatgtgctttaactgtgtacacatctatatctccactgcaaacagcgcaagatcacagcacagaggtccactttagcatcttctcagatctggatctaattcgattagagtaaatacctcacggctctaaatgaagcataaatacgtgcatagaaatggaactcccctttatccatcggctttgctccgtccaggtcccacccagaagaacaataccggtggtccacgtggggcctttcatttcctcatcgggactagcgggctcttctatggaaaattacagttttctttttgtatttcgcgtcttcgtctcgctttttaaatatccccagtctatacgccgtgtagaatttcaaatctacttaaaaaggagaaaataagtcgcaaaatgataaaagtagtcgctatctgccttcaaaatcaagaaatagattttattttctatttttaggtgcatgttattcctcgtcaccaaccggtttattaccggtttatcaccgacccggtagttaattgacgcatttcgatcggtgcagcgggtaattggcgcaggtaatctattcttttcgagacaagcgggaacatcgtcaaaaacaagcccgctaatccttgcccgttgtgttgtttttctcggtgggacctgtacctcgatggggctcccgtgggatgccggtgaggatccagcaagatgatccacggaaaagcaggaaacccgagatttgaagagttcacatccacagttgggtaccaattggccacccgattggacaagataaagaaaaaaaacaacgcacaacatggagaacccccccgagggaataaatacaatataccagcaggccctaagaacggcaatgccagcggttatcacgacgggcagacttgatatcgtcgacggtgcaacgagccaggcgtgtgcaggattcgcatggaccaggacaggtgccgaagcaccttattgacgaggttatcatatcctgaaactatgatccaccttgtacgccaattgaggagttcaatgaagatcctcgtggcgtaatgggggtggaaattgtcccttttgttcggtcatttcttcttcttcactctttttttttctctacttcgttccgttcgtctgacacctttcccacgttaacattgccgatcgtgcgggtcgaatcagagtcattatgagtgggggtcgtccgagggcgagagtaagtcggagcagaactatcagctaagaaaccaccatctaacaccgttccagtccgatgctctgccacagtcaccgaaccgcaaccgagccgccagcgatgcagattatacctcacctaggagaactacctcacccaggagaactacctcacctcggagaacttccgctgaggatggcggcgttcctcggcgattcaactcgaatacctcgacgacacaaagtaatggtagtgcactacccagtttgatcccgcgcaccacgcttgcgcagcgcacccagggcaaattcaccctcgctgggccggatggaaccccccagctgcgtctggcgcaggaacccttcgtccagccgggctacgcggatctcaatccatcctatgaacaggcctccaacgccagaccggtctggtcgctggccaaaccgttgccccgtgtggtgcggccgagtatggtgccgaccaaagatgagctcttgcagaacatggcgaatgcccagcggcccacggagaactcggataggttggggctggacgtggacccgaacgatgtcgagcagggtcgcattgataagacgtccgatccgcggaagatggctgcccaggtgaaggacgctcggttgcagcgtgagaatacctttatgagtaagattctcagtggggatggcggcagctccatgagacagacttcgcgcatgtcgcgttcgtcctcgatcccggggagacgtacctcgacatgggatatgccgccgccggatcaacaactgcccactgtagaagagggtgatcatccagccgaagatgaacatgaacaagaagagcggccgatgtccgctgacgagcagttccagaataatcaagacatgggtgcgcgattggacgaactcttatcgcttcccgaaatggaaaaggggaattaccccgaagacctgcatccgcttgtccaggaactggtcgaagacgaagtgcacaacaaccacaccacttggtccgtcgtccgtacacaccaccgcgaggctctcgccgagggcctgggtgtgtttgtttcgctcaccatgggcttcgccatcgacgtgtccgtcacagtcgccggccagggtaaccccaacacaaccgcctgggcctggggcttcgcaaccatgatcggcatttacatttccggtggtgtctccggtgcccatctcaacccagtcgtgaccatggtattgtggttcttccgtggtttccccgcccgcaaaatgcccgagtacttcgccgcgcaattcatagccgccttttgcgcgggtctcgtcgcgtacggaatctactacgaatccatccagaactacctcctcaccaacgccgacaccggaatcatcaacagctttgtgacgaatccgcgagagtcgtgggtgagtcataccacagcgttcttcaccgagttcgtcgggaccagctttctaatcgtcaccattctggcgctgggtgatgaccagaacgctccccccggtgccggtatgaactcgctgatcgtcggcttggtcattacgtccctcctcatgtgtttcgcctaccagaccggcgcggcgttcaacccgagccgtgactttggtccgcggcttgcgctgctcgctttcggctacccgaactcgatgttcacggacccttactggttctatgggccgtgggtggggtgtgtcggaggtgggtttttcggtgcgttcctatacgacttcttcatcttcaccggtggtgaatctcccgtcaactacccgcttgagcgcacccagcgcgctttgacgaagagtgcaatgaggtggaggcgccgactgcgattgaaaccgaaacagtgagactgtccggtcgagtgtggaatattgtgtttttctatggcgtttgagcggtcactgtttttctccctgcattttgtaccagtatgtccggttaaagaggctaaacatatatcaaataatacccaaggcctagtggaataggatgtttttttcgcatttcatgtctgagcagggtcatcctggcgttttcctgcatatgcaagtttccggataacaaggaacaggtaatacaagacacaaactggtttgcagaataggcatgcaggttgggcatccgaatgaaaatagaactcgatttacttacatcattgagttattttaggtttgtcccttcctggggcccgtgacccggcttagtaatctggatggaccgtgggtcttccaaattggtatccaattcacgtgaatatctcgtctgttaaggttaagcatttgtgtcggtacctaggacactgccaaaccaagttctaacatcatgcctcaatcccgaggtactataactgatgtcggagtcccgcgctcaacctcgccccgcgcgcgaaggccactgcatgagcctactccctcgtaggggtctagggcgcaagcggctcattcctagtgagcccctttctttcaagagggcagctcgatcttccagatacgctttgtatgccggtttcgggatagtcttatctttgtcctcccatacttcatatctgacttcatcctatacttgaagttggcgagtaaattttgcgcttggtctaacgcttcgttttgatttcacaaattcagacgcatcaattggcgggatacgcagtttgcgcataggataggcgatgatgatcgttggcgagtgtgagatgctaaggtcatagtgaaccaggatcgtctctggcttgtcgtctgttacgggcttattatcaatagataacgaggacaacgaagaaggagcaggtgatgcaagtttgtcgatgaagtcgcaggtattactcatatgaataaagagatcttgcgttgatgagtctatagcctggatccatttatgatgatgcgctgcaactgtccttcttgacacccccgccttccccatcgggcatcagaaatagagatgattactttgacacgattcttcacatgtatttcggtgttccatgatgactcgagattgtgaaattgatggattgggcccgcctatagtttccttagtcatcagaacgtgccacctgaccctgtttatcgacgtttatgaatttacctggatctatataatcgaacatgggcttgagtaactatgtatgcaagttgtaactccagttctcggtttttcccactgagtagcctcttgatgctacttttagaagaaacactaccgctagcctgagtcggttcggtggcttaggtgcacttagtcatgactacctcatgagtctatggtggtgcacgcagcaccaggggtctaatgttactccatgttgctcaagaggttatccttgttatctttgtcgttaagaggctcattgtagctagttaatagaatcgatagacgtgggggcacttaactaccccatacaatagttattgtatacctaaaataaatagagggtctctaatatatatttgacacgttaagctctttatagggctagtatacattgggagcgcgttgggcttcttggcaagaacatacagaacaactagattattccagatatttaagcatcgagccaaatcctctaattatgtatttatatacgtgtatacaagatatatgtttaatgcaacacttccccccttttcccctctcatataggtgcatatgtaccctgccacacatctatgtcgatgtacacaatccccgcatgcaagattaggtcttggcccgaaggcccatcgcgctaaagaccaccgtcatcgctcaccgttttttctccgtttccccccatcaacttcggaagaaatttcaaaagtggattattctattttgattgtatttgtttgttgattgttgacacatttccgcccaaacgcctatttctgcacgttcccattgtcttgtgctatctcccgggtcgcgcgatcaaccgctgatcctgcagctctggcccatttccattttctcttttcttctgcatttcactattccaccgccattccactttcttatactttttgtccctcgatcttaatctagtcctccatcacattttgaacatggactatcgacgactacaacactcatacccgccacggccctcgcctttgggggcctcgcaagaacctcgcgatccacacttcaccgcgccttcgaccgagtctcgtcaagagattgacaagtctcgcccgtacccttcccccgcttcaaacgctacgtcctctccgtcacagctctaccagtcagcgacttcccatacatcgaatacccctcgtggagatacttccagcgcatactttccgaggaatggcccaacacaagcacaccgtcgacatgggagtctcgagacaaggaatcatgaacaaatgcatcgcaggaataattcgcaacctcaggctgctcgttatcgtgaaggtaggcaatctgtttggttttgtttttactttccctctgctcggatcccccagattgaggattccaaggatcggacttgtgccgtggttggtccgtcctccgcagccccgtttctgagtatgggcgaccgggggaatagtttccgtaatctcctgattcagatgctcaaaaccacgcgacacatcaaaactcattctccaaatcctccccctcttcccttgcccagacaccctgcccctgatggattttccccggtggcgcagatcgactggacgacagctcgggaacgctagtccaggtcgggtctagtgcacacagaggagcccctgcccctttcggactagcgtaggagcttccggagtcacgggttctcctcgctctggcccttgctttctctttgaaccattgctcactcattcacagggctcttaggtgcctccattatgaataatacgccatcacaacacgaaccagcgcgtctaaattcccaggggaacagtggaaatcctggatttcctggtaagcacccgactgaggcccgagagccgtgcaaccgtccttgtcgcgatacatgcatttcgtcacttatgcgaccgggacatgcgcggtcatcttgaattgactcgctgtatcaagggatatttggctaactcgaacccgtctgataggtccgaacgaacagcccgcaccatccgcgtttggaaatcgccaaatgccgcctccttcacccccacattcatattccgcgcgaccccaatcaacccacgcgcctgtgggctctttgatggcgcgcgatgtacctagcagtcaggcgctccgaccgggcagtagcatgtcgatttccgctatgttaggctcggacccagatcggtctgcgcgggaacctgcacgagaatctgcgccgttcttttcgcgaccacctgcatcgtcgatattcagtaacgcaccatcgtcatcttccgccgccatgtccccacccaacgccccaacaagaccatcaccgctcgaaaactctttcttccgtcgttcgaatacaccagagaagccattctccaagcctcaaggcgcccgtacctaccgatctgggtctggtgggggttcaactgtgggcggagagcagtcggtgttcgggggcttgacgcgctcatcgctctcacagtatcccgagaagccacactcgacgcacccttcacctagaatctccacggcagagccaccgtacaacgaacctcgtcgcatgagtctcaacggtccgatcactcggcccagtagtcagccaccccatgcagacgcacccacacggcccccgggctacagtccgatttcccagcccggaggggtcgcggatcgtcctttcgagtccggccctcggcctgcatctgggtcgtacgggagtcatgatccacagcatggtcggtttgcaaacatatttggcgagcggcgctcggaggatactgcacagcgagagcgagaacgcgctccagcgcatggatcagacgccaagttgacccagcctggatcataccggtatggctcccactacggcgaacgtgactcgctcgatcgtcaccagaacggctctacatgggacctcggtcgctctcaccctccgtcgccggagagtaagcgcttccctgcccccgagcccgggtcgagtttcgggtttggggccattcaaagctacactaaatcactggggtcgcaaccgggcggcagacaacctcgcctcacgcttcagtctctaaacagtcaaccaactcctccgccgcctcatgatccgtatctcaggcaccaagggcagcctccacgaatatcatcaacacctgctatcaccacatccacagctgccgcgtcatcgggtttagccgccctggctgatgagggacgccgcaaaggaagtgatgagctgctccatcatcgcagcctactggccgttggcgttgatgggaaacgcggtggccgtgcatcgccgcttccccaggctgtacaaggcgctcaagctccatacattggtcccgctggagagccagcgatcaagaatgaactagggcgagtcttctccggtattggcagcggcgtgggtggcgtcaccgcgactactggtggcagcgggccatcgacaccattaggctctagtcctttcaagcgcgatagcctcacgggccgctcaatgaatggagaagggatggatgaggcgtctaagcttgctcgaccatcctctgcagccggcagacggtcgaaaaagtcgcgcgacgaggagcagatggaaattgagtctaatgatgcccgaggcgtactatcagcacgtaacgcccgtcgttctcggcattcccaccaccatcaccatcagtatgttctacccaatcaatacagttgtcgtatgctaatattcctctagccatcaccaccatcgccacaaggcagacgaagaggcggctaccctgagctcccttcaacgttctagcttcttccatcgaacatccccagcggagtctcctgccgcacaccatcaccacccacattatcaccatcatcaccatcatgttcctcgactcactattccggttacatctcctatccgtgagcctcgtactaccgtgaacctggaaccgttgctttcgagtgtggcccatcttcctcggcaccaccttggctcaacgctatacacgccacgcatcagtacccccaccgccaagtcgtctttagatagctccaagtttggatatacatcgaccccccagccccttccccgcttcgaacagcgagagaattgcacatttaccgttcgagtcccccgtttccgaatcaatcaatctcaccgagaggaaatctgcgcccgacgcgcgctctgggggactggtgtttatacagacgactccgaccctgtcgccgctgccatccactccggcttcattcgcggtgcgtggggcgacgacgtggacgagtcaatgcttgatctcgagattagagatacctaccagcacgcaccgccacccgaaaccacccctgagggcgaggctccggccaagggcccacgtctaccaccgatacccccaaccgacaaggacctgcacatcaccctactaattcttccccgcctggcccagtacgacagcactctcatgttcgggctgaagtcccgcaaatgggacggtcgtcacgatggcatgagcttcaagatccatgccgtggactgggtggacgagggcgttgctcgtggcgaagagcgcagcggcgaggcccgtcggaaacgtctccgcacgcttatgcagaccggtcggatctgcaccgggcctgccatggctaaaatggatgagctacgtcgtagcggggtgcaggtacctcgcgccatcgatggccaggatcaaccggcagctgtgcagcccgtctcctaattgcgcaccacgtattggctgaatgacttttgactttttatttccttttccccgtggagcctagtcggtgttctgggtattccaaggtgttggctatttttcttgtcattttcctcttcgattttgttttgttttattggccgggtcaacgggatcggatgaaagggggtttccttgatttattcttcccatctatacataatctagcgctttatttctttcttactgcaatgcgcctgtcatatactccatatatcgtattccgtacctttacgctaaaagctctccccgcattggaggggatctcccggagaaccggagtattaaagtcggggcattttatattttgtgtatgttttatatgttgtataactatcttttatacaatcccttccattcaacactatattagtgcccttcacattctacatatttctccagtgccccagctctcccttgtgactgtaactggggaaatggaccgaggctcgtgggtggagcaggtattggtattaccgtattatatcctttgccccaggttcagatgcatatacaagtccatagtcaacacgataataagagccaatattgaagataaaagacatcaagaaaccaattatccagatctccaattcacaattcacctcttcaccttctcatcgttccccgtggcaaagaaatccaagtcgatcgggactgaggtcatgtatttccccagtccccgtaccgcgttttaccggcttccccgccagccgaggtttctgctttaagcgtcattcggccattctttttattctcccttaagcttcacctggacgtccactcctccgaatacccccaaacgaacctttcagtcaaccagagggatgttcactgcttctgcccgaagccgtctttctaacctgtcaaggcaacgcgttccgaacactctgctcgcccgctcggtaagtcggttacatatgctgtggaatgctgcggaaagcagtgaaatcgcccgggatcaacccattgacacgcatatagactctcaaaatggctccccgacgagcagcatcttccgtccctgagggttagtaacacagacgtccggcgcgacgtgggcacaccggatcaaacgctgacagaacagcaggatacaaggaggacctctccaagggcaagatgcttcgtttcgaagactccctccccagactccccgttccctccctagaagagaccagccgtcgatacctcaagtccgtccacgctgtcgtctccgagtccgagtatgagcgcaccaagaacgccgtggaggaattcgtccgccccggtggtcagggtgagtctctgcagaagcgtcttttggctcgtgctgccgacccgaagatcaagaactggctctccgaatggtggaaccaggccgcctacctcgcttaccgcgaccccgtcatcccttacgtctcctacttctactcctaccgggacgaccgcgagcgtcgcaacccagccaagcgcgctgctgccatcaccactgccgcgctcgagttcaagtcgcaggtcgatgatggctctctggagcccgagtacctccgcaaggagcctcaagccatgagctcgtaccagtacatgttcaactgctgccgtatcccctccgagggcgcggatttcgctcgcaagtatcccgcttctgagaaccagcacatcgtcgtggtgcgcaagaaccagtatttcaagctcccggttgttgtggacggtcaacagctcaacgtctctgagttggagaagcagttccagcgcatctacgacaccgcacagcccgcgccccctgttggcgtgctgactgttgcggaccgtgatcactggaccgctgctcgtaagaccctcgttgctcttgaccctgccaatgagctggccttgcaggatattgagtctgctggcttcgtggtctgcttggatgatgcgcgccctgtcactctgactgagcgctgctcacagtactggcacggtgatggctccaaccgctggttcgacaagcctctgcagttcattatcaacgacaatggcactgctggtttcatgggcgagcacagcatgatggacggcactcccacccaccgcttgaacgattacgtcaacaacgtcatcttcaacaagaagatcgacctttccgccaagaccgtgcgctcgcagcttgccgaccccaaacccatcgacttcaagctggacgacgccgccaacgaggctatcgacttcgcaacccagtaccaccgcaagcagatcggctcccacgagctggttgtccaggcctaccagggctacggcaagggtctgatcaagaagttcaagtgcagccccgatgccttcgtccagatgaccatccagctggcctacttcaagatgtacggcaagaaccgtcccacctacgagtccgcctccacccgcaagttcgccgaaggccgcacagagaccacccgcaccgtctccgacgagagcgtcgccttctgcaaggctcacgaggacagcaccacccctcgcgaggagatcgtcaagctcttccgcgctgccctcgcccagcacaccaagtacacccaggaggctagcgccggccacggtgtcgaccgtcacctgttcggtctgaagaagcttctccagcccggcgagaagctgcccgagatctaccaggaccccgcatacacctactcttcctcttggtacctctccacctcccagctgagctccgaatacttcaacggatacggatggagccaggttattgacgatggtttcggaattgcctacatgatcaacgagaacaggtaagcactagcaccccgaccctttttcattcatgcatatctaactaatctctccagcctcaacttcaacatcgtctgcaagcgtcttggcgccgaccgcatgagccactacctcagtgaagctgccactgagcttcgtgacttgctcatgcccgacttggctgcccagcctgagaagccgaagctgtagatgtgtcttgcatatacccggtttttattacttttggtgcttttggatttatgtttccttactccagcgcctgatagatgaatatatatttttcaacttggaatgtctgtacggagtatttacacttgttattgtacacaaagtttgacttgatctttaccttcttttatttgaattgatatatttattcttcgtatacatttttctattctagaatctatcagaacgatagtatttctttccccaggtattagctagcattagttcgtttagaccaatgaaacccacctttgtgatgtacgatcatatgtcctaagtcatatctcaacgtagttctatatgtcaagagattccgaatatcctcaaatatcaaagtccacgcaactccgagagcttcgcaggagccacccacatcggggaattaaagccgtctacgactccaccacgacattcctctccaatcactgcaccaccactctatgaatcagtcctttttcgtcgtttctagcccaaaagagccagaaataatgtcggtgatacgaccacggcccgacgctatagcaccgttacgcgtccatggcgtctctactatcaaaaccaacgcccacctcaatccatcccttagtcttgctctcctcaacagagatacatgtactccgtacatacatacccattgaacaatgcggtacacagagaaatgcctctgggccctgtccctatccctaactctctgttccccatcgcaagcattcaccctcgataatatcaacacaacagccaacgcaaaccacatcttcaactcaatccagtcaaccctccgccactatgaatcatccatctacccaaatggcatgtccttcttcatagccaccgtcgaaaagggaacacgcttctaccacggcaccgggacaccagatcctatcgtcggcgtcgaatggctagcctttaaaccgcagcattcgcttggtttcgcgcatcgtgcacacggtcagaagggattcatgcacaagaatgatgagcatgaccatcatcgaaaccaagatagagatctagatcaaggtcaaggtcaagatcaagatcaagctcctctgggaaatccccctgtccatccccacggaaacacaaacacaaacgcaaacacagaccccgtcaacgcgggctacctccacacctacgccgccgcaaaagacctccgtctcctctacatagacggcatgtccgctggcccaggcggcgccctcgagtcccaggaccgcatcctcttcaacgacaccatttcccatccggagcccggcccgcgtccgcctgtcggtggtccgccggaggagaaggagcgcgcgttccagacttgtcggatggtgaaggaggtttggggggagagggttgatggtattgctcgtaccgagggcgattttgagattattctttgttcgtttgagcgcgatcttgaggttgtggctattacgcagacgaagcctcaggttggtggtggtggacctggtggtggtcctggcggccctggcggccccggtggtccaggtggtcctggtggtgggagggggaggaagggtgggaggaagggtcccggtggtcctcatggccctggtggccccggtggtcctcgtgggcggccacagggtggtgattgttgctcgatcgatgcgcggtatgatcggttacttgggcagaaagtccgtttggatttcgatcactttgtcacggcgtatgggtacgaccttgatcttttccctggggattcgaaaattccgttgctggatcatattcccagtgaggagtttgagcctgttcgatcggacatcaatgagatggttaacactcttcggccggttgactctccctttgattggcaggctgttgctgatatgattgttttccggtactcggatgaactgcggactctggcagctggcaatttctcgtcggttgatgtccttcggacgaggattgagggtgttttggagccttttattgattatagggactttggggccagggaggatattgttgggttgtgtcagaatgagtttattcctgcttctgctcctgctgagtctcttgctggccaggttgtgtcttccatctctcgggaggtctgtgatactttggcatcagggctgttggatgggaaggatttggatgagactgtggagagtttcaagcagcttgtttcgttcttgggctggactacgtggaagtaaggatgggtcgctattcgagtgagactgttatttttagactcggatagtaatgccaattaggtcttgtgcaagggattaccttggataattgaagtcgtttattgcgttgacgcagttcaacttctgagtatttacgtataacgcaaagaatgaagtcgacatgtattgtcatggatttctatattaatttcagtttcccatagacctcgccacttccaatgggaagttttgctagcgacagcaacaggccatgaacttcatacaaaacactgtcagaactgcaacattgacaagcgcatagagtcacatcgccacgaaagaaatgggaaccgtcctcgaaagatgggatatactgaccctcatgaaaatctaggcgccaagattgaaaaatcgaaaccggttgcttgcgggaggattgcctgtggttattctgtggtattgcatagagtattgaacaattaggctgatgtccgggttctcgcctgtatcactcatatcacccctgtgcgggtcaacgagctacgactcgtgatgaatgcacttttcagtctttaccgtctcgcgttgtactcacggcaggcggggccgggggtttggtccccgcctgccccgacgcaaannnnnnnnnngggggcggcccggttttcccgccccccgctccccccgacgcaaaccccgaagctgttgttgcggaggcggaggacgcaccgtgggaagtcgtcaggccaccgatttgcctctctgtggagaaaattagtacggagtatatgtatggagtacgcgcttaaatcagatccactctcggggtggggttactccgaattactgtgggctcaagaaaaaaaaaacgctaaaccggaattctcttacctagttctcggatgcgttgccgaaggaggacgttttctcgggctagagagctcgcttcggcctggtaaaatgcaccctcgtcccggctaccgcgccgagatgcactatcccgcaaccccggaaatggctccacgctttctccgcgcgagtctagcggtcgcaagttcggtgacgccgcttgactgggaggccgcgagcttcggcggtttgatgaagaagagatcgataatctattgccgacaggaggtgtcgggccgggtgggaagaaggccgatcgttccgatgccggagttgtgtcgtcgattgcagcggtggattgtgggttatgttgctgctggtattgatgcaattgggcctgctggctgcggatcatcagaagaagccggttctacatttcatagttactcggttagcttcctacaaggctaaaagggatgattgacctaccacttgtgcttcttgttcttgctccagctcttggtgtagctcccccagcgatggtgcacgctggtgatgaggatctgctgtcgcaaagatgggacttgacgggctggctgtgcggaatgcatgtccgatcgggctgcgatggtcacggtggtctaacgcgggtaactcgctgctaggtcccggactagtacccagcatctcgttcacgttcgaattaataccggcagtggatcgacgttcagataccgatagtcggcctatgcttgagccacgggatggccttggtgagacagtgttcgggttcacgggcaccggaccagttccaggagcggccatattacgttgcgggatggaggaggaggttgaagaggaacgggatggaggaagggaattcagatccggtgacatctttgattgataactgcgttgacgtcgaggaatatgtatgatgcgaagctctaatctgtagtaacgtcagataatcccgtgaggatctgctgactcagccaccgctttcgcggggtcggtcatgtgacacggatgccgtttatggaaaccgacgccagaggctgaatggctagaatgctccagcctgtctctacaagacccagtctgacagtattacaccccgagtgaatatggtacaactcggattctttctctcggggcttatatgattcttccggaatatggaccaggccagactttccacgggtacgaaggtcacggcacagcaaatcatatcttggcccctggttgcgcgcaggccaaggagaggaacacgccggtttctctatgtggcgctcaaatttacaatttctaagagtcatacttctataccgacatgtaaaacaaaatccggggatggccgcaaagatcttcagtgtcgcgtggcgctccagatacgatcgacaaaaagcacgagagtccgggtccgggggatgtgggatggactgtggttgtttccggataacgtacattccgtacattcccccttgaatgtgactagcaaaaccttctttttgcttttaccccagtgggcaatggcgggtatcggtaatcatggggaaatgtcctccgagtgaacgattctgcaagggggagatcaggccatctgctggtaatgcggttatggttgtggttgtggttgtggttgactcgttgactggctgacaagtacgtaattggcggccttccactcgttattctggaacgtaaagccgaaagatgaccgaagagcaagttccctcctttgcagatcgaaggatttgataacccgacagacaaagaaaaaaaaaatttcaatcctccgtactcagccgattacaatgtaagcgaagggcgtgctctggtcagaacaagagttatggctgccaagccctgatgacgatctaacgccacgcccgtaatatgaaccacagcgactctagtgcatttagccgcagtgcctgtcctggatatgattgacgaatgacctgatctcttgtggttaacctgacgtcacatatgggcaaggcaagtcatgggcgacttggcaatatcttgttttaacaggaacacgttgagtttggagggagcaatgggcgtttttttcttccccacagcgtttttttgtttttttagccccttttgtcattttttgtacccgagtccactccgtaccacgcagaacttcagtcgcatatggagaaccatgcggccgggcacggtcggcaataaccccggctccttgcttcgcggggcacatggggtttgatatcccgatcgtcggtatacttgggtgtagatttgacgtggcatgtaagaagatattggacagactcgaagcggacattctctcggcccagaacggcaaacggggaagtcgactggacatgaccgtagttgtctccaatgtgggtccgattaccccaatgagagggttcctattccggctaattagccctggaagtaccagaaagcatcgaatccttttcacccatgggctgtatattgaaggcaattccgtagacgacaaagcgtccaaagaggcaaaaaagggacagaggaaaggggcaaaaggaaacggatctgaagagtctggagagaagattcgaagtctggagaaaataaagtggggtaccacgggggacatcggcatcccgtgagtgtatagtcagtaccaagtactccgtacctcaggtacattggtaataaatccaggattcattccactgaggcaaaagtattcaatcacggaacatgcgacctggaaacttttgtaccgacctcgtactaacccggtactggaaatgtactgacagggccagcccgggggaccgttttggttctttcctgcatttggctcttgcctttttctccccgtttctgtatttaattcctccttttcctcttccttttgatcttcactctctatctctttctctccattgatctttctccagactgcttgagacttctccacactttcttgtctcatttcctggggtttcttctactatcaactggtcttgataccagtttaccctatactaccccatctctacacaaagtgagagtcaacaatgacgaataacgccgacaagtacgggagggacaccgtgcaggcagcagaagctgcccacgcccaagccgttgtcaatgccgctacggaaaagttggaagacgatcagctcgaggaggcctcgcccacacccgatgaggttatcgagctcaccgaggacatgtgctacgacaaactgggatactcctttactgaaagaaagaagtggatcatcattgccgtgatcttcctcgttcagacatccatgaacttcaatacatcgctctattcgaacgccgccactggaatctcagaggagttcggtgtctccatgcaagctgcccgttgtggtgccatgatcttcttggttctttatgcttttggctgtgaactctgggccccctggagtgaggagctgggtcgcaagcccattctccaggcatctctcttctttgtcaacatctttcagctccccgtggctctggcccccaacttcgcctccatcatggtcggtcgtgccctcggcggtctctcgtccgctggtggctcggttaccctgggaatgattgctgatctgtgggaacccgatgatcaacaatacgccgtggccgccgtcgtcttctcgtccgttggcggatctgtgcttggtccagtggtgggtggcttcgtcgaggcgttcctaccgtggcggtggaatatctggattcagttgatcttcggtggtttcgtccaagtggcccacttcctgttcgtcccggaaaccagaactactgtcatgatggatcggattgccaagaacatgcgcaagtccggcgaaaaccccaacatttacggtcctaccgagggcatgtcgttccgccagcgtttcccgccccgtgaaattttggctacctggattcgtcccttcaagatgttcctgacagagcccattgtattggtgctttctctgctgagtggtttcagcgatgcccttatcttcatgttcatccaatcgctctctcttgtgtacggccagtggggcttcaacacctgggagaagggtctggccttcatcccaattttggttggctacttcatcgcttggttctccttcttcccggtcatcacacgcaacgtcaaagagcgccgcgaccatcccgagagcgaacgggcacagtatgagtctcgtctgtggtggctgctttacaccgtcccctgtctaccaatcggtctgatcggattcgcttggaccagtttgcctcagtgccactggattggatcgatgatcttcgctgccatcattggtattgccaattatgctatttatatggccacaattgactacatgatctgcgcctacggaccatactctgcctctgcaaccggtggtaatggttggtcgcgtgacttccttgctggtgttctcaccattccggccacgccgttcttcacgagtaagttgccacattccacacatttcgcattatcatactgacaatttttgacagatatcggtggcgagcgccatcttgaatacgcctcgactattctctgtatgtctatcctttcctgtctcttcgcatgagccagtggtctaacctgttcctagtctgtatctccgtaccacttgtcgttgcggtctatatcatctactggaagggcccgacattgcgcaagcgctctccattcgcccagcagctagaggatgctcgacaccaaatgcaggtgcagagccgacgagggtccaagatccctccggcatcacgcgccagttcttatgctcgctctcaacaagatcttcgcatccgcccaacaatgggtagccgaggcaactcccgggtcaattctcaagtgaattcccgtgccaactctcgcgccaattcgcgccgcaacagcatcaacctcaattcttgatcgctgttcgtttttgttttgctttctgctgtgaatactcatacaatgggagtgagattactgtcataggaatctatgagaattttcacatcccctcttcgtgcatgcgccaatcctacgctgtgcgtggctggcactaattcttgcacccgacgctcagtggatatcccactcctggtctgtggctttttgttcttgtgcacttcaattatgatgggaattggactggaaggaggaaagggcgcgggttttaaaaattaattgtcttgtttttttgtgtttgcttccactcgaaaagacaagatttgcgatctggggagtgtcatgtatgctatgggtttcgtgactgagcggtaccaatcatgaattataccattattattcgctaggaatgctttgtggctatcagtatgttaacttagtaagggtggagggaagatattacctgcagcagtatctcgttcgatctaatacatcagtgtctagtagtacattagtacaacatgaggtcattgacctgacctagcaccaaggacacggtagagacatcctatcaatgcctgtccggctccggccgggactggatatgtataagtcaataaagccgagggtttgattctaagcaagaacccgcttagtataacctgtggagtcgctacactcccacttgtaccttcgtgcttcctccaacccggggccagacctggttagggttagtgccaaatgttaaaaggacttctggtttagtatcactttacattgaacctgggcgggattgttatatgacattcctaggtttatatatatacatatcgacagacagatggtccatgtttcaagtgggcttacctccgacatctggatatatatatctactcacttattatccctttttgctgtcgacaaaatggactagtcataaatgcacatacccgtggacgacaacttaaatctaacaactaaggctaaatagtaggcgatgacaggtctcgagtagaatggtggaatggtgcagtctatacaaccaacgcagcggagtgttgcagcacgaattaccgatatttggtgactttgcgtgcattttggaagatagtagcggaatctccaagttcccgccaatttgatggatgagaactgcgctaatttccaggcagatgagtattggaattgcatgtcggtcaggacttgacaagaagattttctagcaataagactctttattatgcctatgcatggtctataacttggggttcacgacctataaagcatttcccccacctaggtaagtgcatagatttggaataaatcgcacatctgcagttctatatcgaataaaatatgaatacatacgccgtacatgatgtatgaacaaaaatagcatcatagaggtctcagccaattccgataagacactcttggcccgtgcgcctcgacatgtaccaactttccaattcctcgacataacactctgtacctactttgtaccttagagaatgaatcttgcttccatgcgtctctgtgctagacacatctccaataccagacctctcacccgactccccagtctgcacgcacccgcattccccctctcgcgtccattcccgagaatggcatccagcgcgtttcagttcgccgagggcgaggatgcgcagcagcttgcgcacgacgccgacgctttattgcagcggggctgggcgcaggacggagacggaatgggggttacaaaaacgttccattttaagagttatttcaaggctgtggtgagttgtgtcatttgtctggactgggactgcttccgctctgctgtgagactggtttaactgacaatctcctccgtctaggcgtttgttaatatgattgcagccgagagttcgtccaagaaacatcatcccactatgactgtggtaagtggaactttttgagttggtgcctcgaaaaaaagaaattaaggctgacgcctcgttagcggattggctcggtcgatgtgcactggacaacccatcgccctcgcgggttcacacaaaaagatgttacgatggcgcagcattgtgacaagagcgctgatctgatgggcgctgttgatcccggccagggactgaaatgtggtccaactgtctaggttgtcacatttcctcgaatttgcgtctcggcacttgcagatggttctttattccccccggtctggccccctcgacgcacactatcaccagtagatccccccaccggcggttggaactaggctggatgcgaatttccccttgaaatccttggtctttttttttttcttctctctctggatgtcttctttctctcccgaaagggtcgttcctcgattgcgatttcaatctcgactccgatttctctctattacacatttatagatatattcaaacggctatttattgtcggatgtgccatgacgtcgagtcagtccatgcccacgttcccttccgatgatcattgcctatattaaacctcgtcgctcctttttctccaatgcgctcgacaccctgaaatcccgaagtcttgaactgtctagagctgtgtggaactctgtgggactgtcttgaacgcgctcctcgacaatgaatccagatccgccatcaattggcgaacgcagaggtcatcgactcgcgcccctacagaccaatttcagtcgaccagctgctcaaaaacgggtacaacgcccacggccaaccgagtatccaagtaccaatggatcagaaggtcccgttccgcttcagtcccacgttaaacggcagtcctctaaaacgagtctgcgcaatctctttggtcataagtcttcgcgcgcagaccccaaattggaggagattatggaggcacagccagaacctcaaactgccattctcttggaaaccgccctgtcgccctctactatgagcccccgaactatagactccaatcccaccattacctccccgacaattgcatccgcgacagaacgatcgcgcgcgacattgaagtacacccgttcgaaacccgaacccgacccttcgagccaggaacagtatggctggaagcctcccccattattccaggcctatccccaatccaccaagcatgactgcctccctgcacccgctctctctgcagattctatcttgcgcctgcacgctacaactacaaggagctctactgacgacaaccctgccaatccgttagagcaggatgaggctgccgatgccgctcgtaaaaagcgggaacaaaagcaaaaaaagcatctccggacactatctggcaccatcaacaaggcggattggactcagaaagtatatgtcctggctactaccggctatattctccaatatgcaggcgaaggaaagcacgaccgtcttcccgagaggatgctgctgttaggacctaagtctgtcgcatttgctagtgacgctatccccgggaaacattgggtagtccaggtctctcacaatccgacaactgatgattccgccgtaccggagcctcccaagcatcgattcgcgcgctttggcttccacaaacatactagccggcggtttgcgcgcaactttcttttggtgtttgacaatcccgaagatatgatcagctggttagcggctataagagctgagatcgaaaaacggggaggacgtaaattcacgcaagagaagcaatcggacgaagacacaatgcctcagctgcggtccaaatcaagcgttcgacaaatggtaaagaaagatccccatcgcatttccagtcttttccttcagcctcagaccctccaatcgcccgccgaggacgaagatggccagtctgtcggcggtgccacatggcaatctcgccgcagttcatatgtgtcggttaatcgtcgctcaataattgaatctcgatccggatcggtgtcgactggccgaaccgacgccacaaatcctaccaacggctctgcttctgtcgtgtctgacattcattcttcatcattcacttcttcgaatatacccaactcgccgccattaggtaccgacgctttcaggcctgatgagcctgtgccggaagagcttgaccgagtctacacgcgcaccccgcccgcttctgtccatggaaaacgacaatccttatatgttcccctgccatctcagcctccccctattgccgacttcacagaggagccacaagcgcatcacccaccagctattcccgaagctctcattcgcagcgcttcacctccagcgcctaatttcagtgtcccctcctttagcaagaaatttgttccgcgatccgggccgatccctgtctctcatgcctctcccccttcatcactcaatgccttttctcgtcatgtcgacaccgacccaaatatatccgcctttgcatctcctccgcaatctccaacattcagcgtcgctagttcgcgctacacagattcatcagagcccaagcgcatactacgaccctcgaattcagaggatgccctgaccaaagccgttcgttcagcacagaatgccaaaaacttttcccgggcacccagcacagcgcctcctacgtgccctctacctgatcccagagcatcttcccgtccactcagcctggtcggccgccctagcatgagtcggaaaggcgcctctgcatcacaggtccctccaccagcagatccaataccgcgcaagagagtctccactatgtacccgaacaaccaggatggtccgagcatgttgcggcgcaagagcatgcccggtctgggattatcaatcgggcctccatctgcaccaccccccaactgcccactccctaagctccctccacccgcccgtcctaccgtcaataccactatccctactgcttccaccggcacgaccgcgccgcagatgctatccccctggtctgcagcgtcctcaacgcaccgattctacggctcccagccagtgcgtgatcacgttgaagatcgcaagagcggtgccgatcccgcaaacagtgacccagcaagcaacatctcacgaactgcccgacactcaaaactgatcaagagccccgtggtctaaatccaccctcccctgctgtgactcaacatcacatctatgacacttcacctcgctctaacatcgattctccaaaaccctacgagctccttctcacgacattaccttgagatgcattccctataccctttttcctttctcgcatctgtcattactatatctggcatcgaggcctcggcctcataatcaaatacccctgttgcacctattgcatatctgacagcctatcatatccattctcttgttgcgcacttcggtcgtaccaaccctggcgtgcgtacgttggttcctcttttgtctttactatctacagattgcttctcttcgttgcgtttgtgtttttgtatataccccgttttattctattctaggagcatatctcttccctcttctgaactcggtatcttctgtcgagaagtataagtcacggagatccgagcctgtacattaccatatttccttcttatctagcatctgaaatatccgaatacaagaatcctacatcgatttgatgcccgaagagaagttgtgcaatgaattaaagacagaaataaagagaaataaaggcgttcccaatgatatcgattctcagagcaaggcctaaaacgccagaatgaatatggaatatggatcttgaaaatacaaatatcatggatggtttgaaataaacacccgcgttggacctcgttcgaccaattccggtctatcggctttgaatatcgttcacaacgtagactactcctccgcctcttccacacttgcgctcagaactcgtcgcggtgcgactgcggatggggtagaagttggctcggcggaggttgtggttgccgaaggggcgttttctgaaggggcagctgagggagcagctggggccgacgcggcaactggggtgggagcagaggctgaggtcttggatttgctagcctttttgctctttttcgtctgtagggttgaatagtcagctttacgatgtccgaaaatgtgtcaatagagaaatgcgtacctcttgccagccccatagaggcttgaaactatcgaagaacccaacatcctcaaacagattggggaatagccagagacccggggccacagtgaagacggtaatgcagaatagaatcaaacggaagatagccatggcgaagaagagacccaacagtcccatcataccaacactcaaataccacactccctggcgcataatcataggccacaacgggaacaggacaacggcgaagataccggcaaccacagcagcggccatggccttttgcttccactgcgggccgtcgtacaaccaaacataatgcatcatggggtcagtctcttggtgctgttcgatcttcacggtccatagacccttggtgcgattcttgggcttggcatggttgtggccttcatgggcatcaaccttgctcactcggagagccaaaagggaaagtggaagaagcttgaaaacgttctcggcggaggcgcggtcggtcactggggggaggagggagttcttctttgaggcggctttggcataggcgggggattcaatggctcggattgcgcgcttgactacattgaatgaacactgttagatggcgattcctcggaaatatttagatcttggtcgctcacccttgaacatgtccttgcgctgtccgtccatgatacatgtgcgtggcttgaggttctgcgaccgcagccagttggccactgctattgcctttgggtccggggggttgttggggttcaccgggacctgttgtgtggttgtgtgttggtgctgctggggtgcgggcgacggagcttgttgtccttctgttgctgcttgggcctgttgttcggcctggattttctgttgctgctggtgggcttgcattgctcgcatgcgcaactgcgcaacatattgctcagtagtcagaccgagctttgtagcatcggcagtcagctgttcacgctgctttgcggcgaactgctggggcgtcatccctcgtttggcggcttcggcggcgaactgttgttgcatcgccgccatctgctcagggctgggctggccaggggtggccattttgaattaaaatacgggataaaaagcagaagagaaaaggaagtccaaggcagaggaagttgtgaaagaaagaaagagaagtggccacattgactcagctgatttgtccgccttcccgacttccccgacttcaatcttcttcccttttagcaacgaacatcaccctagacatgcactgaacatgcgcttcggagctatttttatgtcgatgctcaatgtctgtccaatatgactcttcagaaaccttgttaaacgctacctgggtggctgttcaactggtatgtgtctcattgcgcagttgatgcctccccgcttatgcgaatatcttaattcagagcgaacgagatgtcgctggccagattccacttaactatgtgacgaaccctgctgtagcattgtcggctgcctgtttcggaaacggcatctatgatcaacaagatgctgcacaatgtttctccaacctcctcgcaatcgggtaccgacgttttgttgtcgatctatattggtcggtcagccgtagaacttggtatttctgtccggtgtctattccagtcagccctggggtgactatatcctcagccacctccacaacgaagacaaccacagcaacagctagtgcggactctgcgactatcaccggtaccgacgattcaaatggagacacactctatgagctaggctcatacaagtgcaccgacaacctcgatccctataccttggcggaagtccttgtaggttatttccgagacacaaactcccgtttgaccgtgtacacgacctatctcgttctcaatctgcatgtcgccgcaagtgcctccacgccaaatgagcctgcttctaccatatcaggaggtcaattgccatcgggaaatgagctagccggctcaattctgggaaccgcgcttgatgactttatctatagtccggctcagcttgccacggacagaagcaatctgaaccaatcatggtataaggtcgacgagggctatatgcccatcacggagtattttaccgttcatgaaaatgaagcgggtgaacagagcactccggatggctggccatcatcaaagtacattcagctcgccaaacgcgatcgagtactcattggatacggctccatcgattcccagctgttgaattacaatctgtccaccgaaggaaattcggtctttcctcctggatacctgacttctgatgtgacggtctccgcaaccaacggcactctgacttcaggctgtctatatgaacctgggttcacaagcgtgtctcaaaccaactcatcatgggctatatccagtggcctccctgtccttgatggcctttccacggatgagacgatggcttcgctatcgaatgttctctccggaattacagcttgtggtctctcgccaatgctgaacactactctcttcgaccagactgcagaccagcaagttgaacattaccgtaacttctcactttcctcttcctgggcttgggtacttggtgagccacacgatgcgaactatggcggcggcgacggtgatcccaagtatgaccgctgtgcaatcatggatctaacactcaatggccactggcggtccacgaattgcactgagaagcgtcgtggcgcctgccgaatcggtaattcgcctttctcctgggttctatcagacacgatcgaatctttctctaaagtgtcggacagttgtccaccaggatcaagtttcgctgtaccgcgtaccggtctcgaaaacacgtatctctacaggcatcttctctctctaccagaaacaacagtcgacttgagttccgcagatcccgcctttcgagaggtcttcttagatttcaactccatagatgttacttcctgctgggtctccaatggctatgaggctaggtgtccctatgcctctgatccgcagcaactcgagcgcaaaactgtacttgtcgctgcaattgcaggtatcatcattcttattatcacagccttgactttctttgtcaagtgcaacgccaaccgccggaattcccggcgcaggaagcgcgtcatcgaaggatgggaatatgaaggtgttccctcatgagacactctatacacctgacatgtaccctggaagtgctgtctcggcctttttggttgtatgtcaagattgggtatctttatatacttcacatctataattccaaggatcctgtcctctgtagcatcgaacttgtctaaacgcactcctctcaacacccttgaggggcttgactctatggtggctaggaataaacacaataggcgactttttgaaataatttggttctgtattctatggagttcccttttggctgtctctccttacatggagttcgttatttctagagttttatagactctcttgaatcgtataaagccgaagtttatacacctattcatttagaccgtctagctgttatgcttgatttgaatgttcattaaggaccagaactagatacaacaaaataaaaccataatacataaaacaaaaatccacacatatttccataaaaaatcaaaccaatggaaactggatataagtgtcccaaacaacgctacatgccactcatgaagacaaaccgtaaactcctagaaaagaccctggatatcacattcaaagcccggcaaaccgagcccatcccgcagcccgatttgctgaagagctcggaacctgtgggtgagtttcgttctgctcgtggctgggaggctcatcgagaaggctttcactgcgcccttcttcggcaaccttgccactcacatcgcggcggcgtccgacgcctagaccggcgatgtaactcccgtatgtagatagggatgcaccaactccggctgcaatgccagggcgggcagtgtctgcgccggtgttgctcacgacacggcccttgcggtcgctttcgatggcgcgtggcgaggcagttgacaggtatccattttcttcatcgttgtcgttcttcttgagggccgcataagcagacatcttgctgctgcgtttcttcgtaagcttggtgggcttgcggacgacctgttcacttggatcgcgtgacgccaatccaggattgccattaacatccagctcaccatagaagcgggtcttgggcgaggtgggcttggggctatcgcgtggaacaggctctgtctgtgcctgtgtattgtgtgagagattggggctctcgtgtggaagagacactggctgtgcattgtatgagatattggggttatcacccaagacaacacgccgcacgggatcggtgttctcgggcctatcggtcaggataggttgcggagttggtgggttaagcatgagtgggttaaatggaagatactcgtcatgctcgtcatcaaagtcgtctctgtgatattctgggtctgggaatatgtccatacgctgatcacccacatcttgttcacggcggttatcatcaaggccatagaattcatgtgtggtgagcgacgcatattccccgcgtacatcctctgggatcgcactagcagcacctggctcaggcttggggccataggcaaaccagtctcgaataccactactgacagacgtcgtggtcttgttgctttttcggctgtaaacagaggaggactggcggagagtggctgcgctctcgtcctgcctctcacccgttggcgatagagatcgttcagagtatgccacccaattatcggacaatgggctggcagtatccgaccgatcagcagtacgtgatgacagatgacgcaattgggcagtagcatcgatgatttcgggggcatgcgaggcaactttccgatattctggggcaggtgcctgtgatgtgaagtcatagggcagactcgcgggttgttggaatagtgtgtcggggctggagggatccatgtaaggttctgttggggattccaagtgggataggcggtgctggtaaaaggatggatgtgactgccgctgctcgtcgagcatacccatcgattcacggttgtaatcaccaccaaaagactgttcacgtgtgtgcatgaacggcacactgcgaggagatccaatgagcggatcctcgaagctggaattcatggtggattgactgagatgtttctcgtcggttcgagcctccttgtggcttatgcggggacgtgcggtcaaattgtcttcaagtgggttcatgtcaggcggtaggcgggagatcttccggaatgtgacagccaagaaacccgatatagcaagggagatgaggtgcaacccgccatttgcgatcgccaagatgaaggtggcctcggacagttttacagtcaggtcgctgttgttgaagagagttccccagtgatatgcattggaggtccattcaccatacgcgataaacgcagtaaacacgtaaaatgggatgattcctaagtcgacaatcgcggcgaatagcccatagctggcctgagagcctgtgggacgcctaagagcagaccggcaattatggtaagcgccatatatggtgtggagtattgcaactatgggctgcaataaaaattagcaagagaaagtcttcttgggtgggccgtactcacgccgacgcgaatgatccagatgacggtcactgcagctcccttgataacgatagagcaaaatagggacccaagggcgcccagaagactgagcactctgagtgcgagctgactcccccgtgcatacttgacccgattctttgttttgtagctcatcggtgtaaatgaactgaccgtattgaaagaaccccactacatccacatccaccattagcagaatccatcactaattaccgaaaggacacacataccgtgtcagggtgtcggttcagattcacttgggattctttttgctttggcttgtctgttggacgagtccaaatcgtcccggtcgcgtccctcgggttgaagccgcggtcggtcggacctttgaaggacggactctcataaaggaatggaggcgacgatctccccatggtagcgactaaatgccactcgtggcagccacgcgaagcagaattaaggaatgttgacgaagttgaggatgtggaatgcgactgtcaactcctgggatgtgcccaggtcacaagtatgtcgtacatccgcaaacatgcgatagtcacccggggcaaccgataagggtcacgtgccctgtatcattatctccgatcacctctgcggtttctcgaatccatgcaccatgcaattaaaacaggcctttgtatgtgctcaatgcacggtacggcttaatcgccggcctcttctacggtgccagagctttgtctctcaatttatatccaaacgctccaacagtcatgtcgcccagtctgatcgacccgtccgtgtggccatcgtgggctccggcccagcgggattctatgccgcctatcgtcttttggctaaacaggaagatgcgatagttgacatgtatgagaagctacctgtgccattcggcttggctaggtacggtgttgccccggaccatcccgaagtcaaggtgagtcacggtaaaccgcgattcaatgatgagtcggtcattgaacattgtatgtagaaataagctcatgattatatgaaaattagaattgcgaagataaatttacagaggttgctgagtccacgcgcttcaatttcgtcggtaatgtcgacatcgggcatgatctgccgctcgctgccctcaaaccacactatgatgccatcatattcgcctatggtgccaccgaagacaaggagctgggaattcctggagaaaaagctttacatagtgtgcactcagcccgtgcctttgtggggtggtacaatggtcttccagagcacagagatctggatccagacctaagcggagaaaacgccgtgattgtcggacaaggcaacgttgcactagacgttgcccggattcttcttacggatgtcgaaactctccaaaaaacagatatagcagattacgccgtggaaaaactcgccacaagtcgcatcaagcgagtgcgagttgttgggcgccgcggacccctacaggtgggttacaatgaatcgactgacggtacccaggttgctaattacttgacttaggcttcctttactatcaaagagattcgtgaaatgctccagcttccagatgtatcatttgatcccattccagacgatatctttccgccggaagaggtcgtatcggcactgccccgggcgcagaagcgtctaatgcagctcttggctaaaggttcagccaatgaccctctgaaatcatcaaagtcttggtctttggatttcttacttgcacccgattctcttcactggtcacctgattatccataccatctatcccacgtgaagttctctcgcaacgaacttgatccatccgacccctacagccccagctccaaggtgtttccaaagcacttatcgagcggaaagcgtgcacaggtgaacctaccagctagcgtcttcttccgcagcgtaggctacaaatccctcccccttccagggctagaagatcttggtatcgacttcgatacccggcgcggtatcatccccaatgatggatttggccgtgtaacaagcttgtcgaacaagggccagcctgaagcgttacctgccggatctctcgtctcccacctacccggcctgtactgtgctggctgggtgaagcgaggtccaacgggtgtaattgcctcaacaatgaccgatgcatttactactgcagacaccgttgtgcaagatctctcaaaaagtgcaggctcaacgtccttgctcaatgcacccgatcacggtagcggtctaggctgggatggggtgaaaatcgaggctcagcgccgtggtttacgccccacatcgtggacagactggcagcgaatcgatgcggcggagcgagagagcggccaacgaaagggcaagcctcgggataagcttgggcgtgtagaagaaatgttgaaggtgcttgattgaacctttatgtatattatggactatctgcacagagtttgacaattctaaatacatactcagtccaagacttcgttttcccttggcattacaccgctttcgtgtactattccgtcccttcattatcacattccatagatcttgtttaacgctcagagcccgcacgcgctggcatccgcctcctcataagtggcgtcaatacgaccaagttgctccgccaggccgttggtgagcgtgttcatggcttgcaggccaatgttgaagccacttggggcggcatcgatagcaatgacgtagattgtctcgtcaatcttgtcgttcgagtagtgcaacgcgtagcatttgccgcagttagggctgttccagcccgggatggtgatcgcaccgccaatgttcgggaagcttggcagtgatgcgaagtcggtgtagccttgagtgaccaggccattaacaccgtcggagcaggagacggtgttcaaggatgatgttccaacatcatatttggggtcgtaggagacggacactgtttccgctgccgctagagtcggagcagcagcaacaaggctgagggatgccaagaaggcggaggtgaaggtgatggtggacttcatgtttatggaggatttgatggtactttgaggaagagtataatgttttgattgcttgttgtatacatttccctccctcccgacgaggtttatatatctccatccgacaggcctcccaagtaaaattgctctaggtcctctttgctggcaggccgcattcggcgcaggttttagatgaaggtctcagattcacaggtgacacagcccaaataggatgcctttatcttgtatccatcagccgatactcccgtaatagatcatcccccagaaacaggtgcaataaggccgatgtctattgtggggttctcgagggaacatgcaggcagagcctggcagactgagacacggcatatcccgggtgctattttcatacgatctgcagaaggatgacatggtcgatccacatacagctcacgcgagattctctctatgctacatacaatagggcgactgcatctgaggttgcatcataacacctcgtacggatacatagaacgaagcagcatagccacatttcattctcgtctgagtttgaatcacaatttaaaattatttcaaaagctgaactcattaaaccaaaaaaagaaaggaataggaggaaatgagggtaaagtaagtagatgaggtgaaaaggcaaaagaaaaacaatcgtccccgggaaggcttgaacttccaacctcccgattaacagtcggacgcgctaaccaattgcgccacggagacttgattgtggcagaggtcaataggaatggcattatgagcatgttttaatgcaatcgattttatagagtgtgaacagatcatagctggtacttaattaccccccttactattgacctatgagtaacgtgtgagtaacgtataagtaacggctaagtaatgtttaagtaatttctaagtaacgtacaagtaactaacgtgcaagtaatgcgtaagtaacggctaagtaacgcgtaagtaaagtctagttgagcaaccaacgtctaagtaactaacctataagtaacgcgtaagtaacgtctagttaggcaacttctaagtaacgcctaagtaacgtctaagtaatgtataatagaggcttggaattttatgaggctccggaagcttcaaaggttctttctccacataactatgcgccttaccgtgattagtcatctttatttttttttttcactttcctctttctttgcttttgttcttgaccaaaactgaacctttgaagctggtttcatagttggtaagctccgagtgattgtttctggtgctacaagaaagttaaaaccgcttaattgtgactatgtaccaccaaccgcaggcatggccacttcccatggtgatgtgccaagtaaggccgactcatggcagaccgacatatcacgattaacagcattgccatcgtaagcgattcattcattccattagcaagggatcttgctttggctcccgatactgatgtatagatatgtaaaaaaaaaaaagaagggcccgaaccgcgatttgaacgcgggacctcgcacaggttcacccgaagcacgaatcatacctaattattaattagttgagattcgcaggacagcttattgaagtggaacgtaccactagaccatccgggcgtttgtgtgctagagttgtctcttttaggaatcttgaattcctgatttttgccacgatctagtacgtcgtaatctactaggtcgtcaacatatgcttcatatttgcttgcctactgtttgcatgtttactggtttgcattacatagattgagatagctgagtgagacgttcaaggtttgcaacgtttgcaaatggccagctatatgggtcagggtcggatggtaagacggctaccaggacaaaacttgctagacgttgacctcgaaaagaggaaggacattttcccccgaatcgtaaatgtcattgtgtacctaggacaaatcaaaggattgacttctagtccgcttaccgactttcaatgggtcagttatatatatgaggattacagcgctagaacgacgttaagtctatggaagatatgaatatatatatctgcagcctcaagttcaagcatcgatctgatatcacatcacaccctcgtaatccctataatggcgatatctgccgaagatatcattcttgataaggacggacctatttgctttctcaatattctagatcctgtgcccagtttttcgaagtggccactattatatgtccatggtatgattccttccaagagcctcccgtgcaggaaggtgagagtgaaatgaacttgacggacgaagagtgacgggacatacagcttcttcctcgtgtacgccatgcaaatttaagatggattggatgtattgtgagagaagaagttgcctgggcaacctgattagaggctagttagatatatcgccatatctagcgatcaagtctctcatatcctgaagcattctacgataatgtgagctgggcggattgtccatttccacgccgatgagtgtcacttactgttctcgaagatgtcgatcttgggggaagagagccgagacatgcgtgttaaaccgcctagatatcgagttcagcgatctgatatatgaaaaagatgggattggtatacagtttatagagatcgatgcgaccttggtagtcctccactggagatgatatggggaagtgtaaatgatatgcttgaacatactcggaagcaaaccggttgcaaaccggtgcccattgtccaagttcatctattaagtttggttttagtcggttagtaaatccatgggctcaatctaatcacgacatacattcattatgagcgtagaaagagcaggcgtcaaacataatgggatttcctgtggtggcattcttcccggtatttccataccataaatcgccatgcaccagacagggcttgacagatcgaccttcactttcgaggggtcgcagcaaacgtgggatcaccttgtcaaatatgacaggactcaaaatttcgatgtcttcgctgggaccccgagctgaaatctcatgcgtcagtgcgtgtcgcattgatttagcaaagaaggtctcccagctgtccgaccactcattgtgctgtgacaggttgccgctataggtagtgacgtggaatccaaacttcccagtcggtgacatgctattattgtgtagggccccaaggcattcagtaaactttcccacgtttggcagttcttgatttatatccttgaattcacataggaaaaaatgtgtgtcggatattgtctcatatgtaccccagccgatcggcctcggaacagaatcagggatgagattatagattgcagtcatagactcaaattcgccgtgaaccatcgctctgccactctcctctagcagaaccttcatgaagaatctccgaacagacccgtctaccaattcaacatcaatgcgccctgttgtagcccgaaagctaaagccgtgattctcagttgatatggctttggcgccatccggaagctctgtcatagtcgttattatcaggacacatttcaagtaagtcaagcaaaggatcactgatactcactagcagcgacagcggggtcaacttttgcgtacggattcccgacccctaagtcttggtttgcttgaaaactcatgactatagcaaaaggggagttattttttttctgaatcttgccgatgaatcttggatttagaggtgtgagtgaaagtttgcatgaggtttcaagaggaatcaggccggtatggtttgttcctctgtgtctcaggcaattacagcttgaggcttagcataaggtgatattgctcttaccagaaaggacccccttcctccacgacaggcaggtgacattgggcctttcttggcgacctcgtacattgttttgtttgcccgcgcgtatttacagtcacgtggtaaacattcacctaggagatataagacctacccgtccactcatcctccctaaaaattatgtagaattgatagaggaggatgaaattaccgacggagtgttccgcgttttacacaggggcgaataataccatatattctcaaggtagtcaaccgccccctttaccagccacgcgatacaggagtactatagcggtggttccttacaacgtgttctaaaggcattattcaccgcgcaaagaaaacccatatggatttgaaaccttcagatgttgttctcgacgataatgacaatgcggtcctcattgacattagcggcatcggcgaagtaacgcacgggtggcgtgctccagagatacaagatgaaatatcaccctttgaacttcctttccaaacgcgtcgattgaatgacatttgggcctgcggaaagcttttgacggaaattgcatcaaacgccgggaatagccccttcgtaggaactatgaagtgggttgcggatcatttaaccaaagaaaatgttcacagccggtggactctatctgagggaatctctcagttgaagggcgatcctaccccggagttcgacctcgtgaaccttgcgtaggataatattatgatttttttttgagtgtatacaaactgctatataggaactataatcatatctcatactccgtagagaggtgacagctatcataccaatcgagatctattgtccgctcggtaaccatgagaactgagactataagtataaattacatcttctctgagacaatcactctctttccatcatatattcttcacttcacaccattataccaaccccatttcatacccagtggccgcggtacagatatctaatgagttaatcataaatcaacttgaggatgaggtcaattaaccattttacagaaatgtcctcccaggagccacctcttgatctagtcaccaatgagcccagagctacggcagttcctgacccggcccgccctgactcttctcaacaaactgaagcccccaaaagtactttggtggctctcaaagatgcattggtagtctctgacaggttgatcggagatgagtccttggagcgaagccgtattcgaagacatatcattcaacagcgcacagtgcttgatagccaaactgcgcacctttctgcaaccgatacccgaaccgagaagcttcagcttctttatgacagaacggtcaaattggggtcgacagccaacaactaaatggctgtcttacaacgtggctcggatattttgcaatcatagattcgatgtcattggagcgcgacggaaaaaggagcaacgcatcgtccatcacccctactacctaattccattgattggctgaggaagggatgcacgtcagcaacaacacagaaataaaattgagtcttgtcttttggtgccttgtaaatttcctcatacttacctcagtctctagtataactagttatggatcaccgctactatcttgcctaccggtgagagatgtatattgggtacctgcgtagtacaaaaatcgacatgaatttcattaagtggcacgatgaatcttagacttcagctggacctaggtaaactcagccctagcctaatctgtgttgaaggccctaaattggttataaaaaccatgtcacgctaattatgcgtacaattctgctgactttacagtttatgaacgccaagaccctaatttgggttgggcctgggtcggaggtattgatgtatgaatacttatagtcaactataactagttagggaaccttgaaatcatatgataatttgtcagcatatctgttcaaattccagtgtcgtcattcagcaagagagtagtagttacctgccagcaaatcgcccaactaaatcggcctagtgggtaaagatcagcagtgtctccccgatatctgaagtggacagccggctgcggccaatcgccccgcttatctaacgcgtggcctgcacctgggcaaccttggaaggcagcgaattttgttaacggaagattgtttcttttcttttcttctcttcttatcatttctcactgtgcgttgcttcagacctagcttggatttcactgttggctttctgcactcgctggacccggcgggattgttgtttcctcgtttcctcattgcttggcgcatacgacaccccatcaattagaccatccgcccaatatgcgcgacgattatactcaaaacgaccctggcggcttccaatcaagtcatgtgttgcacagtaagacagcagtgggcagtgcacacccgcctgcctacggagagtggagcggagaagctacaaatacatactccagatgggacccgcggggatggtccttgaagaagaagattttcctagcggccggcatcgtggtggtaatcgtggctgttgtcgttggctctgtcctaggagtgcgagccaatcggtaccccaattactcgaaactggattacagcttgaaagacgaattttcgggatcgaccttcttcgacaacttcgaatattttaccgccaccgacccaaccaatggatttgtccagtatgacctacaaaccaagcctatgccaagcagatcaactgacgtgtaattcaggtatatcgaccgagctgcatccgaatggcttaatctaacatacgcctcggacacctccgcggtgctcaaggtggacacgacatacagtggatcggaggctgctaatgggcgccaatctgtacgagtcacatctaacaatacctatgctgatgggcttttcatctttgacattatccacaccccgtacggatgtggaacatggccagccttgtggctgacagaccccagcaactggcccgagcacggagagatcgatgtagtggaagctaccaacgctggtacttttggaagccaatcgacgcttcacacgtcgaaaggctgcaccatgggcgttaaacggaaagaaagtggcactgtggataacgagaactgttactacgaggcgaatgactatgcgggctgcggcgtgaaaggcgcttcgagtacttatggtcccgagtttaacagcaatggtggcggagtaagtgatggtgtcccggactgttcatgcttccatcgaaaccaatttactaataaccacccctttcaggtctacgcgatggagctccgtgacgctggtattcgcgtctggcaatgggtccgctccaagatcccgtccgatatcacctcgggcagtcccgacccatccacctggggcaaagcacttgcggacttccccagcacggattgcaacatcggttctcatttcaagaaccagagtatcatcatcaatatctctttgtgtggtgacttggcgggcgcgaccaagtactacacgacacaaagtagttgccctggcaactgcacgacatttgtgcgggataatgcgactagtttcgacactgcgtactgggagtttggcggctttaaggtctatcaaacctcgtgaatttttgaattgcagagtgtgattcccctttaatgtgctcctgaattgatgtatgtgggtttcgatcactgccggggttttggtttgtgctttattttaagagggcggagttttcagggcagattgtgcaatcagaggagcttgagatctcatcatttaggtgatgatgaacaaactctctgtgtatttttcttcgtaatagaaggctaattagcagcaagaccaacgttatatatcttccttcgtgtctttgaagacactagagatccactgataatcattgcaccttgcctctcgagtcgacaggccagatctcctcaatgactccacctcgatgggcataatagaaatcgtgcaagtttacggtagggtcaatgtggctcggtaccatctcaacgcgatccccaaccgaaagcgccggggtcccttcttcccaactgagtgagccgtgctcgtcaccaagcacaccataagtgtacctcgggtccttacactccgccaagccactatccgtcgtcaacgatttcaacccgctgtcgattgtgaccgaccgaggaccttgtttgctcagaacagttgatagaatcgtaagactgttggagtagaaggtaccgacggcatttcggtaatcggtatccatgaaaataaacgatccaggctggagctcagtgacgcccggcactgtggcgcagaactccgccgttccagttcccccggtagtcaccacctcgatattgaagcctgccttccgcagcacgtccgcagtatttgtgaggatctccatagactgtagacattgactcttgcgatcttccctatcatgcaaatgctgcaaatgaccctcatacccgtggagcccgatcagtttcaaatgcttcagaccctgcacatgccgtgctagagtcatggctgggtcacccggtagaacaccagtgcgatgaagcccaacatcgagatcaatcaaaaccgagataggttcgtcgataccggccgtcgccaaagcctcgtcaatagccgttgcgccggcttcactgtcaatcactatcctgattttgcggtgtttgcggtacagttccaccagccgttgtacctttgcagggccgataatctcacacgtgataaaaaggtcgtcgaacccggccgcggcgatgacttctgcctcgctgactttggctacgcagcctccctttgcgcccgctttgaccatcttgttggctaggatcgcgctcttggtcgtttttagatgggggcggatgtcgaggccagttggtagtagcttgtccattagctttttgatgttggcttcgacgagatcgagatctgcgatcatggatggtgtatcgagggtatcgacccggtcgccgactttgggggaatacatgttgatttcgaagtcgagggtctagatgaggttcgaagccagttatgtgctggtggtcagtgtctgggtttgaagcttgacaaggggtgtcgctttataagttggctggagaatgcaagggataaatatgtgcccgtgctgttccataatggaccccgcactaaagatgggcattcgtgcggggtaagaaaatatagattagagaagaaagtgcactaaattgatgtatcccagaggattttgtttctaaaatattcattctttacctaagcatatccagctaagttgaggcatcttctagatccatgtcctttttgtatcagcaagttaccgcataatgtcctaatcgagatgttttttatatcgactaaggtttaagctaaacattacagtaccatggatcggcttagactagtcccgattcaatcgcagctgccatccatagatctgttccgcgccgtcgactatagaactgaaatctgagaggaattggctctttgcttctactcttttatcaaacatcccctggcttttctttgacaccctgtctatgacactattgaggattcctggactaaaccttcacgcatttatcatattgtagagtaagttctgagtgagattttctgatgaattgagctagtagtacggagtagagttaagataacaaatatcattaaatgcgaaggactaagaaaataaattgtatacatgatgtagaacgagcgtcctgatactcttcgcagggctaccggttacttgaccaattcgctgcagtggccgcggtcttggatcgtaggtgtgtcagatagactaggtagtcttggtggccgttttcttaaccttcgggacgcgcacccaccagtacagtgcacatgccgcaaagatattgaagacgatgaacacccacataatgccaaagttgcgccacacatctgagtaattggatgagacagaagtaaggtacacgtttgtgtcgctgatggggcagaagttgcagtttgaggttgcgagttcgtgttcgacgtagccgcccatggtggacttgtatgcttccatgtactcgccgcaggtaccgttcagcgggtcgaagtgcaggtactcgtttgtcgcacatatgactttcgtgttagagatgccgacggacagcataccgctgacgaggtacgtaaatggcgagacgcggtacatgaaattccagaaacctgggagctgtgcgggagtagcaaggacaccgcagaataggaggcagagcatgaagagcatgttgcccgtgttaccggcattctcggcggtttcgaaagccgcgatcatgaagtgtgcaaaggtagacgagaagagaaggaaggtccagatgaagagccacatttgcgcgccgcggagcgtgacggaatcagtgggctcggcgttgcggtacataccgacagggtagtaccagcaaacgaatataatgagagacatgagcgtgttccaggggagttcaacaacaatattcgatatcatgaaagctttccaagagtaagctttagatggacgttcgcggacctcgtacaaactgcgctgggcaacgaaatgtggcatgatttgctggatgagctgaccaaagagagttaataacataaagatagcgaacatctggttctgaagcccctgcatcgtgttgggggtattgtataaagagaaaccgacaaagagagccgagctgccgcatagtgcagtcttggagtagatgtatgtgggtgagcgccagatttgctggaatactcgggtctggacttcacagagttgttcgtagaaaggagcggcgaattcgcggtagctggccttgtcctcgcgcttacccaagacagtgtgggcagggttgacaagctgggagcgttcaaatttcagttcggtgagatgtttttggacatgtgcatattcgggggacttgcgccatgtctcgtaccagtcgatatcagtgtggaatccaggagcggcaccgataacgtcgagcatccattccgcggggttagcggtaggagggcacgggggaccaccgttgcggacgaaatagtcaataagaatttgcgagttctcgccaatatctccatagtacacggtgcgaccaccggcctgcaggaagaggagtcgatcaaatcgctggaatagcatagcagagggttgatggatagtacacagaatagcctgaccgttctttttcagtttatcaaggagatcaaggatagcccatgatgtctgagagtcaagtccagaggtaggttcgtctaaaaagagaagtagagctggcctggcggcaagctctacaccgattgtgagtcgtttacgttgttcgacattgagaccctcaccaggtacaccaataacggcatcagcatactcggtcatttctaggagcttgataacttctgtgacatagtcgaccttctcttgacgaggaacgtgagcgggctggcgtagaagagcagagaaggtaagggcctcgcgaactgtgctggtgttcaaatgcagatcttgttgttgagcgtagccggtcttgcgctggaaggagttattgcggggtttgccatcgacaaggatctctccagtgataacacccatagtggtgcgggtagctagggcatccaatagtgtggtctttccggcaccagagacacccatcagtgcagtcaaggtacccggtttgacccatccatcaacatgatcaagaatcctgcgatggtcctttccaatcttaatatcgtagcaaacatctttccactggaagatagcagtctggcgttcgatgatggcaatgccgtccgattgggtcttcacagcaatgctgcggctactaccgccttcgacatcgtcctctgacttgctcttcttcagggccttgtgcccgcgacggaagactaggatctcgcccttcgacttcttttcggtgatgaactcggtagcaatcagatagacaaccatcagggcgaacatgaaggcaaatataatgccgatgttcctccacttgtgcgaggcggtatagccataagccgactcaatgtagtcgtcgccattgacgtagggctgcccaggcactgatccaactgtggagcaaacacggttgtgagttccgacatccgtgtagccagaacctgacgggacgtagttgacacagatgaagtcgcggttgtggaactcattgatcattagagactcaaagccatagctgatgggattgatataggcgatccagcgggcccatccaagcatgtagtgtaccggaatggtgaatccggtgtacatggcgagacccagaattagaatcgcagcgggggccagggcttgaacgagggatcttgtcaatgatgcaatggaccggaagaacatagacatcgttagagtcaggacgaatgaggtgaatacaaagaaaaagaaggcaccaggttcacgcctcaggtttgtcatgaagtagagaaccaaattgtaagtgatagcgttgaggaccttatagggcaaatccatcaacatagatgcaaatgcttcggcggacgggtggtagagggcatatcgagagtgtttctccacaattgcccgttgagcataaagagtgagcatttcaaggccggaaccaaacgcattcatgagaacagcaaagaagaggagagcaccgcgctggaagaagctgttggtatcggccttgaggttgtaaaatatactggcgatgatgagagccatgatggaatttccaattaacgaagaaactgtgatactaggatcaccttttaatcgttgaaaactgcgccataagcacaatttaacctgttgcacgtatgaaagagtgtagggtgatgatacatgctgggccttggcttgctgagctctccgagattgcttgaacttgtccaggtattcaccaccgagtgcaaaatttgcattatacatctcaatgtcttgcacgagctgtgctcgttctgctgaggccttccatcttgccgcgaactcatcgggcgtccgggggacgcggtattcataccctggctgcacgacacgctcgagatggctagtcatagaagtgaggaaatcggcgtcagtttgtcggttagggcagatgaaacccatgtcaaggaagtacttcttagccgcggtcgtgcgaccaaagtagatctggcgaccttcgtaaagaacgaggaccttgtcgaagtggtcgtaggcagcctggggagcttggtaaagggaaacacaggccgtggcgccgttgatgtcagtctgcatgcgtagagtcttgcagaattcgacagcatttgcactatcaagaccacgagtggagttgtcccaacattgcagcggcgccatgctaaggcaggcttcggcaatactgacacgcttgcgctctccaccggatataccgcggatgaagtcgtttcccacgatggtatttttggtgtgactgataccgaagatggccataatgacgtctcgcatatgcgtggcatactggttcacagttgctcctccggcaatgtggcgtggcgctcgggcccgggcagcaaagaagagagtgtctccaaccgtgagcttagggaagtggacgtcgacctcagcggtgtagatggcttctcccctaaactcggtggccatttgctttgcgctcacacctgacgactattagcaggaagccttcacgtggatgacgtcggacgtaccttggaaattgatctttgagttcttgtcgacaaaaaagccgtgtgtctctccagcgatggtcttcaagaaagtcgagcatcccgatccaggtggtccaagaaccacaagcatctctccagcctccaccaagccatccaagctctgcagaatttcgattttgcgttgatgtcggcctgtgaccttcctcgccagactgaaagtctctaaccagacgttgccaacgctcttctgataatcggtatcggaaccgaaaccgtgcacattcaggttgctgaaggctatacccagtgtccggagtggatgcgcttgtttgtcctcggtctgcatctgtagcatggccgtgcaccaagcccgggcatggaagtgttccccattggggtccagggtcgacccaggctccgctgaaaaggggttctcgccagtcgttgaaaatgttttctgctctgtgaattctctggccagttggtgaacctcggcttccctcttctccacactggagacgtcgtccttcacactttcggtctcgcggtcgccattggccacaaatttgcccaagctcatgtttgcgggtgttctggttcgacaccaataagcgtcaatcgaatatatcgactatagtaaagaaagaaggactgaagtttcggtatcaattgctaggagcagaagattcatatataaagctgcacattgccctaggcattcttcgctctcagtttggactgaaggcatggataacgtgatccacgcaaacaaggcctggaggcgttttgcgaacatttttggtccgtgtcatgcaaacaaaggtttacctcagccaagatcgatggctcacatcagccacctgggcagatcaatgggtcacgtcagccaaaccaatcaaagatcacatcagccagaacaatctcggccccggggaagcgctattggccacatccacattgatctagtttagatttaaagccaaagcgggattgagccgtttcgggccagggatcgacgtaaccctgtccagccctagagtggtctggtctgcccacccacccaccttgctcttgcttctggcattgccgtggatttcgagcttttatcgcaaggaaacctagatcccatctacttcctacaccccgcaattccgtattcagccagagatcgaagcagcaatggtgaacctccaaaccattcaagcccataatgcgactctcaaatcactagccccaggtctcgtcgcggtgttcggtaagttcaacctgctccaacattttagtctttacgatgctcccgaagcaaatagcccgatccaaaggctctgctctaccccattccctctcttgggaattccatctcactaataccctccagtcggcggcacctccggcatctccctctccacggccctcgccttggctcgtcacaccctctctcccaaaatctacctcatcggccgcagccagtccgccgccgacgacgccatcgcctccatgaagaccataaacccctccgcccaaccgacctttctccagaccgacatatccctcctcaaaaacgtcgacagcgtgtgcgacgagatcgcagccaaagaaaagaagctaaacctgctctttatgacaccagggtatatgacgctgaaaggccgggatgagacggcggaaggcttggaccgcaaattcgtgctgcattactacgcacggatgcgattcgtcaccaagttgctccccctcttgaccgcagccgcagaagacccatctgtcaacgccaacgccagactatcccgcgtagtctccgtcctagacccacaggtctccgtccgcgccggcggctcaggtaggctcgacttctcagacctcagtctcaagcacacctttagcctccagacgtgccaagcgcacgccagcctaatgggcgattttttcctagagggaatggcgcagcgacacccgcatactagctttgtccacgcgtacccctctggcgtggccacaggtctgatgcgtgaactgccggttagacgcgtgctgtcgtctgtgctagggacgctgttgagtccatttatagttccgattcaggagagtggggagaggcatttgtttgcggcaacgagtgggagatttccaccgaaagccgagggggcgaagatggagggggatgtcgcggttggcagtgatgggacgaaggggagtggttgttactgggtgaattgggacggggaggtgttcccggcgaacaagaaattagggaggacgaggggggagggcgcggtggagaaggtgttgcagcataccgacgacgcgtttaagcaggtgtgcgaggatggcaagacatacgtgtgaaatgtcatcgagggaagaagtacggagtaatagacgaagaaatagacgtgtgatacctaggtagggcggagtggtcaaataccgggcttattcatcaattttctcatttatacggtattggtgttgtaacagcgtatttgtatagatcgagaggcatgcggctgccgaccttgaagaagtcggtgcgttcagggcccaggaagactggcgccgcttggttggcccctagagaatcctttcaggggtggcttgggcccacagtttagtttcataactgtcgcagtaccggaatgtctcccggttggagattaccagttatgcgcttgggtttggtttcatccatgacggtaagtgctcgttgtctctggtatgtgggatatcccgaatgagtctaattcactgcagatatcatcgataaagaaatccaagacgcaaacctggaggaggtagagcaggccttggaaaaaggcggacagactagcaagatcgaagagaaaggtggctcctctggaaagcgtagaatcgttgcccagattctccgcgagatgatggcaatcgaccccgagagagcaatggatgtcaccaagagctgggccgctggtgttcagcattcgagtacccggcaggatgacaagcaattcaatactctcgaggagtacatcccgtacaggtgctttgatgtgggatacgggtaagtctcctgcacccaccaacgaccttagcatcctaggtcaaacctctatccgatactaattttatcctgctatcaaggctctggcacggccttgtcgcgttgagctgcactattactatccccgaggaagaggccgatgaggcgagggagcttctcatgcctgctggaaatcctagcctgcataagtgcatatgcatggtatgcagtttatttccttatactatgaggttccacggggtcgagattcttagtgagcgccgccacccttgtattattgcgggcttggttgttgtcaattgtccgcatttctacttaatgtagccgctatcaataagctgatggccctggtcgtgccgtaaaagtctgtatgctcggtctggtatgctgatatcacgcgccgccagcctgaagcctatcaacgacccgaaattatatttctaattatatttctagctgtggacttatttccggcgtgtcttcccctctggtactgcgccaccactcactttgccgcacaagttctccatcttcaccacctagcagagtccaatactttttcaaaaaccacacctttgcctcccagctgcggacgtcccacggcgtacctgtcgaaacatatccagtggagttatttcgatccttcttcccaatgcctgcacctccccagcatactaaaccgttcagcatgtcgtggaagaagtcatcctcgtcaacctcttcctgatgggcgatgagaccttttcgtagtgtcgggaaaggtagaatatctatgtatggatgatgcttgacagtgatttgttcgctgctcggcctcaagtccggcttcagtgtcttgaatgttctcttcactgtgcaaatcatatttgctttggccatatcatccgctgactccgtgctagactggaagaatggcgagagagattcttcggcacagagcgtctcctcggtaatgccaacatgtattccaagagtactcagtgcagctatagtgcagactgtttcgatgcgaaggttgttggcatatggatctgctgcaggtgcactcgatccgaatctgagtatcctaacctccccacagctgaaggggcctgctggaccttctgtccgtatctggaagtgtgggctggagcagccgcagtcgatgttggtcgtccagtatagaccaagggcgtcattttgtttatcacaaatgagaagagaaggatcaacatgtgttgtagaatcccatacgctcagtgacggtggtgtgccgtctgactgcgaaatatgtgttgtagaatcccatattcttggtgatagtggtgtgccgtctgatcgtgaaacatgcgttggagaatcccatatactcagtgatgatggggaggtatctgcctgtggacaatatgttgtaaagtcccatacactcggtgctgatagggtgtcatttgactgtggagtaaagtattggcattctctcgaagtcgccgtagatggactggaagtagatatatcccaagtatcataagctgggaggctctttgcaatatgggttggagcagtggttgagctaatcgttgcgaccgcctcggatgggcctgtacccgcagctggtgttctttcagtagcacggcccggcgtagcagatgctgcaagtgcttcgagactctctaggcgctcacgaaacttttctcctagacgaaggattagtattcctttttctggggatccctgtacccatgatccgtatgttgccggcatgcctatgccagagaagacctgtactcacggtactttctttgtgcttgagcgttctgctgccgtctcttctctgggtcacggcggacaggcttccgtttcgcctttcccacgctatctctctgcagtgttccttctcgagtctgaaatggcatcgtgtaaaatgttgggaagatgtcaaagatgtggctagaaccgttgcggcacagctgctgtggggaccatggctgacgtgagccacatattttcgcccggctccacgattggctcttcttaagtactgccccactttatttgtcccacagagatcggagcagccgaagctatgcctaacatagtaatattgatgccttagaatcctgctggaccccagaatgcaggattttgacagtgctcttccaaatccgtctacttctatgctttacatcctgaatattgagatcaaagatcccgaaattagttggaaggatattttagaagcgtcttaattgcctatattaatctcatattttttattgattttatatggttaatgaaaagtatatgaaggtgacggtcctcctctggagactgggacttcatcatttggagatggttcttaccctcaagggcgacttttaggtcatgtgacgcgtaacaactattgatcctatcaggctaagcccagttgggaaaccggaaaacatcggcaaatgggaattctggtttactcgtgaaaaagaaaggagcggtctcttgatatggctaagaattggcaagaaagcaggttaccggaataaggtattttcgaggcatttttgattgagtcaatgtctgtcagctatccaacgtggagcgatggaagtcggttgatgccctttcaagcgtatctgaggtggttctcaaaaatttgggaagtgaggttaccatcaaagatagttgatatcaatggttaagtcatagctaggtgagagtatatatatgatttatgtgtgatttccggtgaagggacagcccaatagatttctcttaacctaggatctgccatcccttgtagtgcaatgaagaaaaagcattgtcgcagtgttgcactgagtgcctgcccaccatgaaacgcctcatcgtacctaatcactggtgaatattcaagaccagtgacttccaacatctacttcccggacaaaaattgtctcatcgtatgttgtcaggaacgcatacttgaggtccagctcacgcatttgaccggctaattgccctgtccgttatatgaatgttagccttagaacgtatcgagcttgggggattaagtgataacacgaacctaggtagcgcctctcttcgccgtccccgaaagtaagaatagccgtagccagtatgttcacactcagacaatcccacggcgtctttgcctctccgatgaccttgatggctttgtatgaatcaaggataatgaagtccggaacacctctgaaggctgttgctagggttgtctttgttgggacgctcagggagtggagagagagaagagttttgcagttggaggtaatagtagtaagatactgctgggatagtgattttattaatggtataacgggatctgaaggcgatttgatatgaggcgagagtataaggggatccggggacgatacaatagccaacgcctgctctgtagctgcacgttgtctagaacgctctctctttttggcatcccgataagattgatactgatcggtctctcggttgctggcgcgtgagcaaaatagctctaaaggatgcgagtgaccgcatctagtatatattttgaaagctacaatgatagagaaagtagatgcttagacagagatatgctctgcttatatgctctttgtctgaaagaaaaactagatgctttatctgacatatctgctctgcctgtatgctcaatgcctgaatgatcattatgcacccatagagatcatggtcacatgacacatacctaagatgctcctctttactccccaatcaaacaggacaaacagggcattcaacagcctcatttcccacaattgtgataaatctgcctatggatcgacaagccacagaaaattggagacgagtttcatcttttacctgcaagtcaaatagtcatcatagattctgctcgtaaaaggagcctttgatatgggaatgtacagagtcttcctgtcaacctcggcagttaccaccggctccactcacacggacgtctggactccacaaccggccccgccacgaagggaccgaatccccacaaggacaacgccatggaaatcggaccggaaccgaacaagaagaggctagctctgagtcggtgtcggaagataaatagatggaaatggtggtgtgatgagttgagaaggggctagaatggcagggaataagttttattcaaaccttatggaagaactttttacgctattcgtaggtgaaaggctaggctgagcagtcgatgggctagtcatgcgaataaaatgagcgacatggttagttttttatcgcagaggaatatagggctggcgtccaagcacaactagacagagcattactatctgtattgatgcaacgagattgaggccacagagggcgaatatctcgcttacatcggttggtccgttatagctaggtttgctagtcgaatagtttgtttatttattatctcaccgaggttgggctactgtcatgagtcacaagccaagatacaaattatggttcaatggcttactgatgataagaaattaatttattgaagctagaggaccgcgaataaaaggtgtagaggaaaaaaaacccggatcagattagaataatctatggtatgtggtgttcgggcgtggttgcttttggttggttcgctttcagacattcactagattcagctgagaggactatccagatagacgagttggttgtacattgaatttgatcaatttgaagaattaacctcggctttggcttagcaggatgaaatactatacaacacgcatccatcgttgatttttggcatcatgtacgaataggaaatataacaagctgaaccaagtatgattagatatagaactttgaaagccatataaacataagaacgttaatcattactgggactaacacatgaacagccgcacacttcccctctcgcacctattatttagaagacagccccatcccaaatcaccgaattttgcgtagcccaatcggaacattatcgtcaactttattttgaggtgcgtcatcattccagtccacattccgggtggaagccttttgccggaagaagcgatacttctgcaaaagccttctatagaagaagagtaaggcaactccaataaccaatccagccacagagccaacgacaatacccgcaatagctcctcctgaaagaccagagcttttttcactcgtggtagccgagttcttcgttgtgcccgacgccgcagtagcagtagacccagatgcagcggtcgtggtagtagtcacatcggtgaactcatcacttgtcacattgaagcaagggacctggtaggtgaatttgctcgcagcgacgtatgtgatgtctgcacacgcgtagtaggtttcgtttttgtcggtatcaaaatccgaggtgtatttgatctggaaggtggcgttcgttccctcttctatgtcgatcgatgggttggggacggagtagcattcgtgtcccggcttaatgtcgctaagagtagagccattaatgaagggctcaaagtcatcattggtacttgggtctaagggaaggtcagtctggatagataggattgatgaagttagcttactgctcttgtgagagatagcaacctgcattttccatgactcgtcttggagtacaagtgcgagcttgccgttgactacaatgtcttgtcagtatgtccctttttgtggatagtgaggctcttactaagtgggaagttcgttcggttcacgggtcctgttgatgagccgcatggggcgttgttgtcatacgctgcaccccagagacgatcgggtggccacaggaaggcagccgggcccatctctttgctcgctgcgtcgccatgggcacacaacccaaccgcggagaaagcgagtagtgcgaggtagctcttcattataccgagagggtatgctagcagaaatatatttgtagaaaagaatcttgaagggaaacacggaaaaacgagacatcgccgtttataaacatccagtcatcctcgactgcatgacaatctagagtagatgagtatcggcttgggccgactccgctgccacgaggttgacaaattgccaagtgtaccaagtgcttggcaaccatagtttcctgcaagttacgtccgggaatcttctcaccggagttggaccactgatatggatccattcaggccgagtcacaagccaaaagccacaagccaagatacaacttacggttcgatggcttgcatatgataagaaattaatttattgaagttcgaggagcccgccggataaaaggtctagcggaaaaatcatacctacgacccggatctgattagattaatcagataagatgggtgggtcttctccggctaatttggctgattttcggagctcgcttacacatactctcaggatggcctgggttcatttgagacattgctctaacgggtattctcagccggaatagctcttggttctccgagcgtacgtaccactagatagttctcgctccgaaaagaccattctgccaagcatcgtatcgttcttggggggacatccgcaggtaaataagtagacactgaactgccgtcacttgaggtatacatcttctgtctctacaattccaaatacaaacttcatacctcatttcactcgttgatatcatcatgcgtcttgttaacctcgctgctcttgcctgcgctgtgatcagtgccagcgcattcgacttcccggaatttgtccctctgcaccggcgtcaggaggccggcactccagcatatgagtgccacgccaactgcggtatgttccatatcctctatgcaaatcatgactcggactaacaggatcaggcggcgtgattgtcgatggccgtactgacgggtactgtgataccgatgaattcacgaccgagttggccgcttgcttggaatgtgcccttgagtatgacatttggcaatactacggaacctccgtgtcaaaggccgctactgcttgtggattggacgctaccccggtcgaagcatcttctaccactacatcggctagtgcaaccactgcatcggatagtgagaccactacatccgacagtgctagcgctactgagactgcggagagtgtcacttccgctgagagcactgctgcggcgaccacctctgctagtacttcgatcgcgacaacttccgtgagccccccgcgtgtttctggttctcctcgcccgtcgtcattgattccttcggccacacccactggaagctcggttggtttctcttctactcaactatggacttatagctaacttgacacagactgcttctagcactccttcctcgacccccgtctacactgatggtgctacgattaatatgggcagcggactggtgtctggtgctgttgtcggttgtctccttgcagctttcctgtaaatagtggtggtgtatagtaatacttgatggagcgaaggaaggtgtgagaaagattggtggatgctgtatattcaattctctcttgtgacaggccttgaacctgtctactgcactattgcagcaagaatcctttattaagactcgaaattaacgttctaatctaagagtctcagattgtaagcagtattttcttgaaaaaatagtcccaaacttgaagcaccgacatcaaacatacgatcaaatcccagaatgactaagacgagcgactgaaaatcatcatgatacgtaatataccactaactgcgacgatgtaaccaactcgcgacttttttagaagtccccaattcgtttttttgactaagtttggtattgatataaccttcccagtatacttaggtacacatcgttcatcctgcgagctaactaataccgatggaccgttatgaattcatctcatcactcttcccatctagtgagttaaggtctgtttccaaatctaacccacagccaaattgaactgccctttaccttcagtaacttcgaactgccacgacttcccatcatacttctgtctctttttcacggtcacggggaacattccctcaaccggacacatgttggatatggttgccgaatttactttcggtggcgcattccagagcctatcgaccggagtaacatcgtatcgtaaggcagtcatggctactagtgccaagatctcactagtggcaaagtggcgccctgggcagattgagggagaaacaccgaatgccataaacgcgccggtgcgccggggctcctttttcttgccaccattattcccggttgttgtagtggatctcatgaaccttcgttcgttgaactcgtcagccgaatttccccaagtgctctgatctcggcccaattccttcactggcatgaagagcatggttccagaacggagaaaatatttgtccgcgaggacaacatcctgtgtcacgaaccggacggccaccattgttgaccttgtccggaggacttcttggtacaccgagaggagaagtgggcaatcgcgaaagtaccccacatcaatgatatgcataccgtcgggtgcgctcttgagggcgttctgctctacctcttcgcgtatctcttcgagcaattgtggtctcgagaaaagctcaaagtgaacccagaatgcagcaggaacggtatttgccagtaatcctacaatcaggggcatttccgcgtatgctatttcttcatgagtaagtccagcccccaggaatgacctatatcgcatggctactagctccgagccgtcttcatgactgccaaggtcgaaataagttttgaacgcagcacacaaagtcttgcgtgccttccaggtcttaggggcaagtatccatggcaaaatgctggacagtagtagggccacattacgttcgaattccctgcccgggtatttgaaaggttttgtagcaagttataggtaggataaactcaccagaatgtgtcttcaatgtgtctaatttttgaatgggttcgaatttccatatgttgcatttgtgctgacactagtaatggtatgccgaagccatgcattcaaatcaacagtctcatagttgcccatgtcatcaatgatgggaagtaggtactgaagcattatcctgttaattctgtcaagggatctccccgcaaggacgggtccagtatcatgcacaattttagaaaggatgctcgaatcatagctttgatcacataaatggaccagcttattgcgcggagtttgacatagctgcttctgtgtgaacttcactaacggttccaacgtaatggccgttgggtgtttttgagcagcacgcatgatggcaggtgatgaagtcacaaagagcctgaaggaaaatatattaaccccgaatatttgttgatcgcgatatttttcgctgtcgaatatgctgggttagttcaaactgtacaaataatatgatcgatgactcaccacaacatgctaagatatcctgagccatgttggatgaggccaatcagatggcccacaagcggaatcgtactcgataccgagggaggctcgcgcctttgaccgtgaaacgaagtatacgatgaggatagaaccacaaccaatactacaccgataatcgccagatcatcaaagtctaacatggccaagttagttcacgatgtttgagtgaagcagagtttagggaattgtcggtgagaggtaagtgaggcaagaagcagcgctgagagtttgtgattgcccacgtcaaggccttggagtctcccaaagaggtagttgctgaccagacgacgtttcataaaataggaaaagtacatgttttcaactgagattggctaaccctcccgtcgatcgaccttcattaatttcgtgccttatacattctatttgatgctattacttagataaagttgcgtctggtaagtttatttgtactaccagtccacataaatcaccaagacgtcccagtcctctaggaaattctatgctaatgcgcatgtttagagaatcagatttgaaatggtttgttaaccaaagtgaggctaacagtacgatcggagagtgacgtggcacaccgtgacacgcatgagatagtagcccccactccctcgtttcgaacgtttggtaaaaggatagtttcagaatatatcggcgtggtagttatttttgctttggcataacaaagttatcgttgaatttgactactgagcttgtacgtcaacgccaggggtcatagatgcaagtatatctgcgagtcccgcatatcaccttgatcaaaaatctctttggccacttctcttgccttaataataataatgcaaaatgtttgctttctaggaggcgaatcatatctcaagttatcaattatctctgacgtttcatgcggtagacattgcaaatagtacagcgcatattgccactggaccataacaaagaccaaggttcccatttagggtccacaggggtcatgactgttgtctccacattaccccgcctagactaagtcagatagataaagaagataaagaccaggttgatttgactctttccttcaaagtctcttcgcagagatatttgatcaattatacattctcaatatggggggagagaccctacaagtgaagcgttcccttctgtgggagagggctctgaagaactatcatcaagatcttgccggtgataaggaattcgtcaagatactcaagactagcagcctcgaggagcttcttgcggatatccccattctacggccagttaactcgtcggaaaggccactgccctgcaccatggatcgactggagccaacattcaaactgttgaatgatttcttagagatactaagaaagtcatgcggcgcggagtcggcgcaaacagcgctagtatggggcagtatacgaatgattgtcacggtgggcttccttcatgagagcctacacactcttatttgaggctgactagtgtgcagctggcatctaccacagacaaaattttgcaagaagtcttcgatatgattgaagagctggccttgacaataccacatctggagtcctgcaaaatcactgtctcaatgaccacggatatggagacggcactgttgagtctttaccaagagtttatctgtttctatgcccgcactatccgtttctttcggaatttcagacaacgtaagtattgcgttctcagactcaatccggtcttcgtactaatttgagccagcgtttatgatgcgcagctcatggcccaccctccagggcgattttcaacgaacgatccaacgagttaagcgcctatctaacaatatcgagcgcgagattgagctcagtagaatgcgactcgataaccagaaataccatgtggttctcgatttcatggcgaggttcaaatcccagtttccgaaaaatggcgatcaagtttcccaccatcttcctttcgtggaatgctcccatttctatggtagagatgatattctttgccaaatagatgaagcgctatttgtgcaaccctctgcccgctcacttcgatccttcgcgttatatggcatgggaggagtcggaaagacacagatcgcattgaagtacgccaacgcatcgcgtgaaaagttcgataatattttctggatttcagcccagaattcgataacaattgggcaaagctttcgaaatatttcaaaggtactcggtttgattgaactagacacagagctggacgaccatgccaccattctcaaagtcaaggactggctatcatccgcaagtaagctacggacacccagccctgatgggccaaaatattgaaaactaacgaacaaaaatatagagaccagctggctccttatatacgacaaccttaatgacttgagcttgatcaagcatgcttggccggcaggatatggagggtccgtcctagttaccagtcgagactcaagtgcggccttgtatcccgcctcgtcgggatgtcaagtacacgctttcgatacggataatgggaccgccgcattgctccacctactcggattggactcggagtctacatcttatcaagccgaagctaagctaatcacttcagagcttggaggtctgcctctggcgctgagccagattggcggatttatcgcccaacggcaaatgtccctgaagagttttctcggcttctacgaccgaaattcaactactgtcgatgctgagcgtccagaaagtatggattgcagtcaaacacttgcaagtgtgtgggaaatggcgctgagcggcctttcccggaatgctaaggtcctgatcatgattctatcattcctagacctcaatggtataaatgagacagatctgagaaacggcacggttctagcaaatgacgcagccgtgaggttcatgatggatgagatagagtatgtacgtggaatcctcatggataacactactaaccttaccgttagctttttagatgcccagagagacctcctccaaaggtctctcatagacaagtccagcgaaagtggagttatttccatgcatcgggttgttcagcgtgtcgtcatccgtcgaatgagcgacgaagagcgagacaaaacctttttgctcgctatagccatcgtttccgcaaacttcccagatacatacagcgcagatatcggtcaccagattgcatcctggaacgattgcaagaagaacctgacccacattgagagcattgtgagcaaagggactgagttcaagatctttgaaggggagaatcaaccgtttgcggaacttctgctccgctgttcctggtatgtttcaatattataatctcaaacattaattctctaaccaaagacaggtatctgtatgagacggagaattacagtctcgctcgttcgtatgtcgacatcgctctgcagaaatttgtggacaaagattctcttgcgtatgccagtgcagtggatcttggaggtttaatcgatgttgacatttgccatccatcggccgcgctggaggccttcgaaaaagcatacgcactacgcacatcaattcttccgagcgatgacttgtttctggctgccagccaggtcaatttaggacttgctctcactgagattggcgagtttgaaaaggctctcggctatctccaacagtcaatcgatatccggctcatgcacaacagtgacaggattggtaactcttacagtaacttggccagtttactgttgagaatgggaaagcccgacgatgccgaagctatactgaagagctgcccatcattgaaggacttttcagatgagacatttctccaaaccgggaatcctaggttctccgggtaagttctcctgtgaaggcccgaaatatatgactaacatcatgcagagatatggtattactgagcaggataaggaacgcccaagggcttcatgacgaggcactcaagtttgcatgcaaggccttagatttccgaagggaatgctccaaggagcggctcaaagtctgtgactcgctttatcaagtgtcggttcttcggcacaaaataggcgagttggagcttgctcagtaagtacaagccaatacacagcaaatgactataaatgctgacatatttcctcagacaactacttcaagagtgtatcatgatatctgaagcccttccccacgccgagggcctaggacatctcgcacgggcaagctacaagatatcgcaagttctggcagaccttggaaaacccgaggaaagtacattttatcttgagaaggcgatcgatatacgaggagagttcatgaagttggatggagactacgttgttgtgaacggaggtgcctcggatttcgaacgtctggtcccctggatgctgtggtgatctacatccgagtccaaatatgtatgcatgtcacccatgactcgaatagcgaggaatattcagaggggctggatcccacaacagatattctagcttgccgtgaattttacaaattgatcatctttgttgttcaaacttaggactttcaaaatatcatgtgacatgggactattaaggtgcgttggagggtgttcattctgggaaggcacgtgggtttggggtataaaaggacccctccccccaactcttcttctcttcttcttctcttcttcccatctctctgaccaccatctcaccgtagcccccacgagacagcgtaggcagagggtcccgtagcacatgctgcttcacctaccacgaggacatcaacattacaatgttgtggaagtccatgtaggtcagcaccacacatcaaaccgagctttctcgtggatgttcctgaagtcgtggctctcattgccacttgacgagtcctacggaatacatgaggggtgtaaatcttcgtagccgaagacgcgtaggtttgatttaattgtaagcacactggtcaccagagtagtcatggcaacggcaacccatttccacggtcttgttaagctgaccagcgaagctaggcgattgtcagtgacccaaatcaagaaaagcatcacgacatctgaagtcacaggtttgctccgacaattatgagatttgacgatagctggatggagaagccagttaaccatcgcttcttttcagtcctgggttgcatcaaaattgtatggccccaagcaccaacgcgagatgctgagattttgacaacgtctcggacgccgtccatgctctccctcagcttcgacgcctattttcgctctaatatattaacacaatatacaagccaagccatcaagccccctgactcgatctatacaacctgttcctcgagcgcagcctgctccgccaatgcttttaaagatctcttctctttttcaatcccattccgtcgctgagccgtgtcacacagttccagattcccacattcacattccccatccctgagccaccgataagtgatactccaccgtttcccgcgcggcctcatcgtcccatccgggaggggatcattttttcgcttcctaataccatgcgtccaatgtagcctcgagtcgccgctcatctgcatcatgctccgcggggtcaagtcgacctcgatgcgttcctcgccccggcggaatatcatcatcgccggtgcaccaagagataatgcgtagagctggtcatacggtccgtgtgcatctacatggggcgggatgcccgcgcctggaggatagtactgcagacagacctggtctggaggtcgctcctcagtttttgggatgagaggtttgagccactctgggaattccttgtatggaatctccgggtctatcccgaaagttttatagtcgaaggtgtagccgtagtggagtgatatccggccagggcggtcgggccattctagctcgttggcaaacaacgagatgagtcgttgctcgtgctcggcattgacaaagtcttcttgccagaaaatgccgtagggttcggtgggcaactcgcggaaattattccgatcttccatagccctttttgatcctgtcggaccttgaaggtgggaataaagtgcgtggaacctttctttgcacgtgtaattttcaaactctgattttggaatgtattaattaccggtatcaataccacacactgcatagactccaagcataatcttggaaattgtccaccataaagtgttttgagctgtattgaaaaattaccgaatccgccaagagcatcaacattggagaggtacttgtttgggattttcgacatacttgaattgaattcaatctagtatcgaagagtgttctcgatcatccggctttggccttgtatctccacagggaacgtcgattccggtaaaaggacaatgaggcaatccataagagcatcgacaaccaagaaattccttatttcagcccaatgtcccggcttaagcactccaaaattcgccaccagtccccctgaccctatactgcgactccctgctccaatcgacagagggaagaatagggcccggtagcgaggggacttctgaagggcgattctcccggtaactcgacatatcttgtagcgaaatccctggaatttgttaaccttcaggcgcgtcctactccattagggtatccactcacgtgaatacggttcaagccgacttgagacaaaaatgggtgtgctttcgcgtggcgatcgtcgtcgacgcatctgaaaagattctccatctccatctccatttgtatgcatgagaatgcccacgctgacaattccttcaacctcagaactgcctcctcatcgtgtattgcctgagacatcgttgtcgtccgagaatgagtgttgtaaaaggggccgagatatccagttgttcctttttgaaggtagaagatagttgtatagcatgggtgattattattaccgttataactgtagcgcttaacctgcgggttgaagataggtgtaggtagtgatgattgagatgagtaaagggaaagggaagagtaactaatttgcaatgaaattgaatccaagtactgctttttctttgtctgtactcgcatcatatacaagcaaaggccatgtattgacccgtgtctatccccggaaatttccgccttcttgtagcatgcggcatatccccgcctaatattatccatagtatactacttagtatctctaactcacttgttattggctccaacgaaccttcaaattggactgccaggcttcctgtggcaattaacatctatatgagacattgtaattcaggccagtctattctgaaattgactgcattaagagtcagagtgatttttcctcctccatagcaaacgccaacctgcccttactatgattctatcgtgattcaggaattgaaaagctcgaataattgatacatctccatattcatatactccgacccaacgagggacatctattcatatcaccatccaccaataaataggggcttcttgctggtttgaatggcgtcaatgcagccctgatatcgtttctttgtaatcatgcagagagccagaaatgaagctggtggcctgaggccagacaagctcctttgtttctgacggcacctacaccctcttctcctcacctcctcatctcctcttctcctcttctcaccttctcatcttctgctcttgtccatcaccagacaaaaatccagagttctctttccaatcttttccgcctctataattacatatatcattatcttgtcgatgaggttagctggcacatcttgctattcgctgaatgacggcccaaacggttagcctggtgagtctaccaaatgctagagtccttgatggatgcaaatctgataagaatgctgaacagtgtgcccctcaattatcgggctgttggggatgcatatgatggggccggcattttgatctgcgctagcgaggcgctgaacggggtaatcaggagccctccccggaggtctgccttctcctcctccgtatacgagacttctttacctcgaccatgagacctcttcccatcgaacttccatccgttactctttttgcgacctttgctttattttcgacggtcagctccttcctcgaaaaccacgcacaagtgatgtcgatccttcttcacttcacaacaagtggcgtcaacagtagccaccctcctatggctgggcctgttgcctccactgatcgccctacaactttcctccctcattggcgttgtcgtcagcgaccttgattcgatggcgaaaggtcgtcaaaccacagcagccatccaaagtattccgctacaatgccttctgcactacgaccgccaaacaaagcatattgaagcaacgaacaagtacggctaatgggcggtgatttacccgaggaggtattcttttcatcagtctcctagcacttcgcaagcaaggaagcaacatcttcagcatcaccgaggccaagaagggatctcggtacaaaggattggagaaaatcatgatacaggagacacgccagagaaaatcctttttttttgtgatatatgtaattatctatatttttcctgcaccggtcaacgaatcaggcatgggaacgttgcctatcatgacaaaaccaagaacggggtcataaagtgcccaaaaatgaagctgcacggtcttttgcacttgaaagaaccattttgagatcgaaatcattctctgctcctttcactgagcatttgagggggagattgagattcaccgtcgctcctaccgacagatagattgtcaacagtctgatgggctctcagcatagggcatgagtctcttctttgcctcccaaagtgagcagatttcgcaatatatctccgcgtggcagtgggcaactcatactaactctaccttgatatacagctagaataaacggccataacacatatccgcgcaaaggagatccttcaagccccctctacattcaatgtgggatcgtctaggaaagcttcttttgtaactcaccctctagggcatgtcgggagctcaagttcgctttcaacaagccatttggcaggtacttggaggccgtgaatctgtattccgccgactctggatgctgtatcatgtcttgacttgggtgcaagaagcgcttaagctcccgatatactttacaggtaggattgcgcatgaagtttccctggacgatctcttattcaacgtagggtgttgtggccttttttttttctataaccatgctattgtcatagccttgggtggcaggctctattgttgggtcgtcacccggtgggtgcagatcccactactagttagagtagctagttccgttcctcctcttctatcctcttctctctgtccattaccacttcaccagaatctcccttcttgtctttctcagacgagttcacctagaagtagatctctatcatatatcctgcaagttagtttattatcataaatttcaattgaaacaacggaaagctaccatcaaatggaactattgacagagcgtagttgaaagaatagcagagaaacagaatgaactagccaaacaaacctaacctaggatgtcatcaaaaactggctccagtctagcaagtgatgtcttgtacaatctgggtagaccagtatcctcaaacgtgaccgagctctgggccatatccgcaacagccctaccggacaagaatgccacaggcataccatggccattgaatcccgccgcgataaactgacccggtttaccgggaatactgccaacatgaggcaacgagtctgcactgtaccccatgactataagtgagatgaaggttagtagaaagaaaataagccatcgtatataaaagaatcgcacataccaccagcccagatatgtttgatctccgccctactatcctcccacccaaggaacgtgcgttgcatgtacccatcaaagtaatccgccgcaaccttaatcaacttcccatcatcggggttgttataccactcctcgcgatcatctttgaaaagatgcgacgccccgccgacaatgagcgacccgtcattccgggaaatctgataaatatatccctccggaccgattcggatacaatacgtaccaggcaattcctggtgaggcgcaccaggtgccgcagcgatctggctgcagatccccttgcagggaatgatagctttggaatactccggggctaaggcgctggtaaacgcgttggtcgcgaggataatcttgcgggcgttaatgacgccacgactggtagttaccggccaggatccatctgcgtttggcgtctctccgatttcagataccggtgtattggtctgcaagttcaggccgtgagaaacggcgatgcgaataagatgggaaacgagtttgtaaggccaaagatggcctgttgggaaactgaagcctcccttggcatctcggacatgcgctatcttaacgcagatatcgtcagaaataatgagagcggaaatggtagcctgaaagcccatatcgacttacatcctgggtctctgcttgagacaagtatttaacatcattcataaagtccagtccttggtcaaccagaaagtcgtagaaggctttcgccttcttaagctggtcttcatcaagatacatatcataagagcgggtaaaagtgagttcgcaatcaatgttctctttacggaccagctcttccataatcttcaagtgcgagatttcgaaccgcacgatctctgctgctgcttcgatgccatagcgttcggtgaacaaggccgttgctgaatagatatctggtctcaaatggccgcctatgcaaaaattgagtgagctggacttatatacataactcatactatgcgttatgtgtgggtcttaccattgcgcccggtggcaccggagcaaagttcccgagcctcaaccaacaccacgcgaggagctggattttgcgggttctctgcaagcaagcgataagcagccgaggctccgacatagccgccgccgataattaggatatcggcttcttttggtagttctgttgtagtttggtggttgtcgagtggatctggttgtgtccgccaaaatgattgggtataccccgctgctgggcgagggaagcatttttcgttggagttggatgacatgatgcctagatgtccgtagtttacgatgcgattcgaactccagggatatgcaaatgtgaatacaagtgcaatgcgaaaacaagaaaagtgggcgtccacgggtggtatagcaaagcgttatcggagttgggcgcgcagcctatcgcagagaccgaactatgcggggctgaaaacgaagctgattgtgcgactttgatctatagtattcttgaaactcatgatattgctaaatccctgctatgttcacctctgggaacctgctcggttcggattcgttgagctggcactatttctaggctgccgttgttgatcttcaaatgcctcgataacatcagggcagctcgattgggccttgcctgattgtctggccaaatattcagactctgttaatcgcgctttcagaagttgattccgagtcttggaatgcatagccgaatgcaagcttttggctaagccctgtcccggataggctattaagcccaaagcacctagagatgactcattagcataatcccgctagtggtgtaaatgtgcatcacaaacctgatgcagctttcgtgcccattccaatcgggccttgaacaaatcctctgattgcacccatgaaaccatctttctgggcaccttcgtagggctgtcggaagatatcagcgaatccagttgtgaacccattccgaaagttatctgaggccgcagcaactccagacttaaagtcccggatattgtcgtagtctttcacctcctcgccatagagcctgggaacagccctcaggccttcattcaccgctccaggtatgtctaccaaaacgcccttgtagtagtaggctatgatcctccccacgcttttggcggaacccccaattgcctttcccgcaactatccagtcttcatctgtctggttggttccgggagtacgtgagataccttcggatgggcttcgctcggattgatttgtaggctcgataactacaagctctggctggctctgctgatgggcacgagtgatctctttgtagggcctaataacgacgtcgcttgatgctgtgaggatatccttatacatgcctagcacagacgatgtgccgcccgtgataggatcccatcgccgggtcataatgaatatagtttttgtctcgtatctagttcgaaatgtgtattagtataggtatattgaataggatggttggatatatggtctcacgctttcaagtcccttgtatcaatgcgagaattctcaagcaagatccccgctgccattttcgacaaatttataggggtctttccgttctgttttaactgccaaacagccggctcggaatcaagaaactggcatttcattttatcgatcggtaagttgcgatggaaagatgcaacagccgcagagactccagcttcctcggtcatttcacgagcaagatcaccagctgctgttagggtatcaggatgcaggcagaaacggatagcttccgctagattttccgcgttcaaagtccggtgtggaatgggaattggtccaaccccacgggacgcgaccatgtttccccaaaatagctgactgggataagttagcaaagagataggaaaagcctgcaggaatgacatactctccaaagaatggtacaataagcgagggtcttccaaatcgtaaaccacatgctgtagtccctgctcctccatgatgtacaactgcagcgaccttctggaacagccattcgtgcggacagtcctcaaggtaaaagatctgatcgtccgattcttcttcgccgagcttactccagccacgggatataattgcacggccaccccaggacctgactgccttgacgagtgtggcagtcatggctaggggatcttcaatgacgatgctgccaaatccaatatacaccggcggaggcccgctttggagaaacgcagcaaggtctgcaggtggtgtgaagtccggaggagcgcggaagaagaagccacagacatcgatatgtgccggccagtctgttggtttaggcatcaatgtaggtgaccagcaatatgtgaatggtatcttcaaagtctctgctaaacggggaccttcggtgagcgatatagcttctaggtcgatggattttctccaatcattgataacatcgcccaagctgtttgaggtcagcctattgcatcaagtatagcagggatgtatctggttgttacccttgccatgtcagccattcgacaatcccgtaagaaagataattcgccatcttcggctctgtggttgaatatttcaaatttgccaagggatgtggaaatgatctcgtactggtccacggcatggtaaacatcatatgtagagggatgccaagtgcctgagcgcagtggatatgagcgaagcttggagggttcgcaataatagcatcggcgacaaagggcgttttcgtaacggagtcatcctcaatacaggaccgccagcatccctggagaatttcgcctaccatgacacgcttgcgttgaatgtcaccctcttgaatggatttcatctgtggtatcaagcctgggttcttcaccatgtatgccatcagctccgagggatctcccccgatagaataaaattctagaccagagtcgcgcacgaagctctcaaacacaccatgtgtcgctagtcgtacgcgatgtccatggcgctgaagctcgttgcctagtgcgacaaagggctggacgtcgcctcggctgccaacaacttggataacgatgttgagttcaaggccacattcaaaatcacccgacggctctggctgtggttgtaaatgctccgcatgtagaaatggtatcaactttgacacttccctgcccactttggagtcgagatcgatatcaattcgaccatcatcttcgcgaaattagcaagatattctcgcaaacaagacagcgatataagaccgctcttacccttgacttttgtcccgtcctgagtaaattggttgcgttcaagcgtagaaggccggcgcggtggttcttccatcgttgcagcccaatgacatcacacacgggagatctatccgatatagaatttcgtcaagaagaccgatttgacttaggtatttccaaaaccctgtgaaggatccaataatttcaaacagaaagcagtatatgaagaggagtaatcccaaaacaactgaagaccatggtacctaggtggttctgggccgcgtgggacgggtggaccctcgaccgttgatcccacgtgacgtcaaatataagccaatcataggctgttttacagaagctatatgacgtcattcctacaacgagcaaaaggtcaatactactaggaatttatgttcattctgtaagttgtagctttgtgttttgatttagggagcctgttcatctcttttaaaataacatatcctggtaatacccaaaaatcaaccctcttaaaagattagcatggcttgtacctttaccgtcaaagccaggttagtgggaactgaggattatgagtggagagctacgaaattggagtcagtgttaagaacatcccacactggtccatccagagtcaattgcacatcgacggcgcgcagaagattatccggagctgaagagcgtctggtacgctggcctcgaggcagctcctcctcggtagacatgatgattgccaaaccgttaacccgataaccttcactgaacgccggcgacaccagagaaggggcaatgcgcttggcatcgacagtaacatcaaaatcaactccagcgtatgtcttgcccctactccactgtgtagcaacgaggcaaccacgtgggactttctctttgaacctgatgtgacgtttgttgggctgtgcggcaacccattcaaactgctgcttgacttggttcatatcaaccgagtgaattgtatcatgaataagctgtgcaacctcccagagtgcgcctttttcgagtagttcatgggaggcggaagccgaggggcagtagacggcattcggaaagtagcgtgcgggaagcttcagacgagtggagtcgcgcatgtccatggttgtccaaaagctgcgaagtggctcaagcgatttggcatctggtgtgagtcccttgttacgcaaaacctgaagtcttgcttgataaatgcgttggtagagataggctgagatgagctcgaaccttgtgaacgaggtcggttcctgggcgttggggtcgattgcagcattcttgattgtaatcagctcttgaccttggaagcgcagaggataactgctgacagagggagggtctgcctcagatatgtccgtggcgttctcgtccagacaatagtccacaggtttgaaagcaagggctttctccttctggctggcggataggctgttcgttcctctaaaataagagaagatctcagggggagagatgagtgttggcggagaagagtcgcgcaattgtctgtagatctcagccagatcacgcacaagctgcataaacccagtggcatcgcagacctgatggtgaactcgaatacccagtgcaacccctccgcagccgaatcgagtgtgctggatggcgaaaataggattgtgggagacagcgcccattgttgaatgaaaaattggaagaactgcattcccagaatctggcagaaaagttaccaagatacgggctgaaaaagcagaaactgcaatactcgagagcctcctggggcactgcgcttcccaaagctcagcgccagcgcccaggctaccaatctctagagcctggctgactggattctgctgcagacggccagtcaaatgcgggtaatagtccaggaggtgcgatgcagccaccttcaagcgctcaatcgtaagaaaattgtcgcctacaaattttgctggttttctgtatacgaagatgccttcgatcgtcaacatagctggcacgatatggtccatcggtcctagactaaaaggggactcgagcgcggcgactgtggcctcattggcgcagttaagcgtgtgccgcgtagaaacgcggacttgatccagtggcatcgctgtgattggacgaagcagagacaggatagcgggggaatcaggatggataaagacgtagaagagttgacaatgatagaatatgacgaggataaaaggggatgtagatgaaggggaggtaaaagagtgaaagtttgcgctgcttgaaagcaatggggagggaatctttgccgcgttgttgggatgataaactaatttgtccccctccgagtgaacaaaattaaatacaaaggccctccggaagcaaccacagtttattctgtataaactatcaaataaaatttaaaaaaatggaatcaaagaaagcagttaaggaaagcaatccgagggtgacgcaaatatatatcgaacaaagaactggacccgtagatgactttccgacttttacaaagacaacgtggccatgtcaattgcatcgtctatttgggattaaggaaagtgcgagggaactgtcgcactttaggaagacaggtgggttgggggtataaaagggccctccccccccaactcttcttctcttcttctcttctccctatccctctcagccaccatctctccgtagcccccatgagacagcgcaggcagagggtcccgtagcacatgctgcttcacctaccacagggaccataacattaccatgtttgttatgaggtccatgtaggtctgcaccacacatcaaaccgggctttctcgtggacgttcctgaagtcgtggctctcattgccacttgacgagtcctacggaatacatgaggggtggtgatggctgtagctgaagatgcgtattctacccagattgtctattcttatcgttatattctcatgactgtctaaacggagataatatcagatgatacctgaagcgtgaaggaagcaatttgtcacatagctgggagatattctgttgaggataccaaaatacaactctggagagtattggaacgtctcatcagggctaccataatcttacatagtaatctctgaagaatgaatgtgctctaatatccaaagatcttgtgtctgattctctcacaccgatagtagctcacataagctttgcgtagacaagacatcaagcctccaaaacactccggggtgcttaagatggaactgcaggtctcatctaccactctatactacatgctaatagtagtatgtgaccgttgaatgctcgggggcggctccgaccaagagacccacttttaggcggctccgatgtggggaccatatctacttgggtatcaaatgttctaaatatttaaaggcttcatctcatgttatctcaatcccaaattagcacgatctattccttttttgtttgactagaactctacgatggccaatccctcaatcgtcattgtgcccggcgcatggcaccgtcctgcgcactaccagcacctcatcgaggagctcgcaaaggtcaactacgatgcagaggccgtgaccttgccttcggtagactccaatccaccactggccacctggaatgaagacgcgcaagctgtgcgacaagtgattatgagcaaactggacgctggaaaggacgtcatcgtgctcgcacattcatttggcggcgtcgccatgtccgaggcagccaagggtctaggaaagaaagaccgagtcgcacagggtttgaaaggcgggattatcaagctggtctacatgtgtgcgatggcgttgccgaagggccaaacccatatcggccagttggtcccgcagacgcccgaggaagaagagatggagcgtcagcgcaaggagatggaggaaaagctcggtggactagatgtgtcaccggtatggacttgagtctttgcttctatataccttcaatgctaatctgtccacaggatggagcaatcagcctcccgaaggaccgtattcacctcgtcttttataaccgttgcgagcagaaggatatcgagagggctgtggagttgctcggcacattccccgcgggcccgttgaccgttcctgccacatacaccgcgtatcgtgagatcccgagcacatacattgtctgcaaaaatgatcaggcattgcgggaaccgttccagcggagaatgattgcacaaggtgagggctgctttgaggtagaggaatgcgatgagggccattccccatttatgagtaacccaggcttcatcgtcgattgtattcggagggcagccggagagaaggtctaggcatgcgaagacgttgactaccttgtcgccctctctatgtcccttgagctttccagtaatatccttagacctgggaagcgtaccatatttgagatttccatgttttatatgatgattctcctcttttccaaatccatttgaagctagaatttaacggttgcctcatttaaggcataatcaggcatcagtcgtggcgcggaacggaaaatcaatccagccgcgtcggaaataaccagatccagcggacgcctctcttgtagttatcatgtagacacggaatgccgggagacctcaattctcccaaggcgtcaattcctaccgtgaatccaccgcggcgccaaaatacaagttgtgattcatgccggcgttccaagcggcgatgtgttgtgcagtcggacccagacggcattcccaatgcgatatgcacgaattgccagcgtttgagacgccaatgtacgtttgaattcgctatagcccagtccagtcttcctttctcgcgaaaacgacagaagcgcgactgcgaggaaaccagtgggccaacaacgcaaaatgaatcgaatgacttcgatacaacaatcgaggaaatcactggaagctcgatcaatcgattcgatgctgcatctattgctgaccaagatgttatggcagcttggctgaatcttgattatgatgagattgtcgcggatagcgccacctccttttcaaccaacctcgaaccttctaattcattcgatgcgcttcgttctgagtacatagcgcccgcagagagccaacttacggccaccacatcccaactgactcgcttgcatcgaggacagaatatccgatcagataatcaccggccaacaattaggctttcactcaacagtcccatctacctgctgaattctggagtagacgcgaagatctttggtgatcgtctcgcccggatctatgaagcaatagcaacagccagtgcatccagattcttggactacgactgcaatctctatgcgactggcagtcgctaccggttgggggacaatgactcagggagctcaaatggatccgaaactgccaggccaaccgttgatgtaaccgctatctcaccacggcttgatctttcagtatcatcgcaagcaatgtctcatgaaatttccttgataggaagtgttcggttccttgatcatttgggcggtctttatggcaatcgactgaactcggctgctcggaagaaatcagatgacaccttctatgctgtccttcgcgtattctcgatgcaatggttaccgaactcaccttcgtttgaagtgggttctccttatgatcactttgctcggaatctagaggcgggagatgactcttccttgaacgccttcactgatgcttgggtgcgggcaagatcactcctcaatgatgcgcacgacgttcggtcatttcgagtggtattggcaacactcatgttcgttgggattgttataccaactaaaataactgatagagaggatctcgtaccgaacgacttccttgacacagctctgcaaaagttatcctatttagatggacttgttacacaatactgtgcgaacgtggggccgtcatctatatatggagctcttgctgaagcaagtttaagcattatccgatggaccgcgtatattcgcgacacaggcgcagcgttagcgatggatcggcaatgcaaacttccagatctgtggggtactacaaaaggttagtattttccatatgggaatatcaaattcaggcaactaaactaaaatcgcacagtcctctcaaataaagaggccgtggcagcattggcagtctctcagaatatcttagagttggatatcaatgtccaacccatctgccggaaagcaagtgcggaaatattttgtgtctggaggcagatcataagcatcaaaacagttgctaaccagtggcattgcactatcaatgaacggtcctcgtcaatcattagagcaataaacttgagtgtggcagctgtccgtgacttcagccaatcattccaacctttcatctctcagtgcatcagaaagttcgattgtctgtccacgtctcccaggatatctcttggtaagatatactcctaccatccttgactcatcattctctcacaatgctatcatcggcatcctactgacatttatcccttagtttctctcgtgatgttttggaaccttggcattttcctattcgccgaagtatttagaaaggtgaccaaagaccttgatacctacatcgaacaagaatcaggaccaaccgtccgagaataccagcgcgaggcagcttcatgtgtggcacaagtagttgaatgtgtacacagcttgcctaccgaggaagcttttaacctccagaatggactcggcgccgaagtcccaatcaccgcttatcatgtcacaccgagcttggctgtcacgactcttcaacgggccattgagagtgtgatagacctgcaacttcgctctcgctctgatgctgatttatcagacttatcagacgacacgcagtttttgataccggatgggacctgggaccgacaaattgacattctcatgaaaggactcatctcgcttgacgttactattggcggatcacaaaccagtggtgtggccgttagagggttaatgcacaaacatggggacataatatccgagtgttggacttcggggtttgactcatgacatgcaaacgtggtggattcagcggaaagaaattggtcgatggtaaagccaagcacattccttcgatattcctaggacaagaagacgccagaagcattttggtacatccgtagaagccaggatgctcaagtctagtttgacctagctccattccggaggccagcagttcctgtaactaggattatgtaacagtttggaagtatcgggcattcaggtggaactggcaaactagtaagtaatcgatgtcgtcatccatggatgggtgcaacacaaatgtgcaggacttttggggctacagtctcttcgctggtgattggaagttcagaatcactagtacgcacacaccgttggagccctacgcgtgtatacataatagtatatttatccttagtcctttgtgacgtgattcagaatttgtcgtgaacattgccaacatcggacaactctcctctacgggtggactaggcgccccaccgcctcacccgcgtgcaaacccccgagttttcctcctaactgtgataggtcagtaataaattggacattatttaaacttttgaggcttgcgccagactgtggagaatgaaatctcttttccaaccatcaaggtgaaaagtgtatagccaagaactggaccatttattcatggcccccaacgtgccaaagtaccgtccaatcacgtagacaggtgatggataattctgctgccttgctgcatgatggcgcgtctgtgttgtcggaaagcgaacccaaggaaaaaagcttttgcatactttgtctaagcctttcaatcggcaaaaggatctctggtatgaaaaataaaagtaacatcttttacggtccatagcttttagaacatagaagcacaatttgtgtaggtcagaagcaagacgatgatgaacagggataagaatgaatcagatccaaccgacgcatgcaaccatctttcgcacactcggagcttcaagggaaagcttgtacatgtagccaagctctcctcaacggtaacccagtcttgctgattagaatttatctgatcgcaaataaggtttaatctgatcgaatttatcagatcctccaagttatctgatcatgaaaattatcagattgaaagttatctgatcaaaaaattatctgatcacgccactcggagaaatccttggaaccaggcccccacaatccatggatgtttactacggatgagcagttatctgagaccttacgaagtcgggatctcggagtaatttcctgcatactaccacagcaaggattgtatattaaaggccccacatggtacaggaaacgccaccctcgcttacacaaatgggtacgacctaaattttaatatattcgaaagaaagaggttaaaaaatacccccgccctctaatcattcattccaggcttccacaaactacctgacacttccactcatggatacggaggacacgtccaccgtcaaaggggccaccacagagcacccacagcccctggactcagaggaatcaggtattccagatggagagattcagcaagatggtgttcagattgccgacgcagtcacaaccacgtggtctcgcaagcatttgattattgcttatactaggtgagcaaccttgctataagatgttggtcctaaatgccagatttaatgtgaaaatagtatgtggctggtgtatttcgtcaacaatctcaacagcagtctcactgcaaacctctctgcttacatcacgagtgacttttcggaacactcgctactgaccgtgattgcggtggtgaccagcgtgatgggtgctgcatgtctgatgcccatcgccaaggtcctgaacctttttgatcgaactgttggattcgtgatcatgatcttgattgcaattatggggttgatcatgatggctggttgtaacaatattgcgacctactgtgctgcacaggtgggtttgcatcatcaataccctctacagggctatttcaagatcactaatgaattcataggcattttatactgttggattcactggcgctattttctgcattgacgtgataacctcagatacctcatcccttcgtgatcgaggtcttgcttatgctttcacctcctctcctagcatgatcacagcctttgctggctcccccttatcaaaccaattccatgaaaccaattggcgatgggcgtatgggacgatttgcatcattctccctatcgctgcatttcccctgattttgacctgggaaatggccaaacgaaaggccgacaagaaaggccaattgcaatacaagcagaggacaatacgaacctggacagaaagcatttggtattacactatggagtttgatggttagttgcgctctcgaatccattcctttcatctttactcaccctgtttgcgacctagtcgttggaatcttcctaatgataggcggcacgattcttttcctgacatctttcaatatcgccggcaacaccgaaggccaatggcaatcgcccaagatcattgctatgatggttgtgggattctgtgttctcgtagcattcgtcggttacgagcgatggctagctccgaagcctttcatcccattctatctactcaccgatcgcactgtcattggcgcatgtctactcgatattacctaccaggtctcctattattgctgggccagctatttcacctcctatctgcaagtcgtctacaacacaagcctgatgcaagccggttacatcagcgccattttcgatttcatggacccgatttggctgatcggctgtggctttctcatccgacacaccggtcgtttcaagtggctactctgctgcgccttgcctctttatctcctggcaagcggtctgatgatctacttccgccaaccgggtcacaacataggatatatgtgcatgtgccaaatcttcctcgcagtgggtggcggaacatttattctgatcgagcaggtttctgttcttgctgcggcctcgcatgaggactatgccgccatgttggcacttctcagcacgtttgggaacatcggtggcgcggtgggcagtagtgtttccggcgccatctggacgaatacactccccggcaagctacgccagaatctgcctgccgacttgaaggaccagtgggaggatatatacgagtcgttggacgtacagctcagttatgcggttggttcgcctgctcgtattgctatccagaatgcgtatgcattcagccagcgaaacatgatgattgccggtactgcggtgatgggactttcaattatctgggtgctcatgatgaggaacattaaagtacagtctaacaaggatctttccaaggtccttttctagacggagaatacggggctcggaagaagatacatagactggtggactttctttctcaaaccgatccaatccataatggatcgagcccagttcagggtagctggaattaattggttacggtattctacatatattgcaacgttaagatggctttcacgcatttcatttcaaccagcggatcattatgacatgagaatttttcacttctcctgggagatgccgccaaacgcgccatgaacttaacactcgtatatcggctctcaaaaccagcttgaattaccgagcttacacattaacaataactaatgtggacttctacagactagtcgatttgaattgccgtaggctccataaatcaagattcccatcgatctaaagactagtatctactctactcggccctcaattttcgagaaatactccatgactccgtacaaaccctcattactcacctcccttttcatctgaacttcctgggtacgtagatatccttactttttgttcttcgtgttgttaccaaatttggtatgtgcgaaactttggatagaaaacatgagctcgagagatgtttgtctgccaaggggtagatacatcggaaaccagtattgtcaatattatgctatgtcattttgtaaacctcactctcacatgaatccatcggttatcttgatctctttcagcttgcgaggccttctaggcaacccgtttatatgcccatcatgttcatcgttgttgccagcctggtatttccgaacacataagtactctagcccaggtggtaagcagtttatcagtctaaaccttttcctttccttgtaaggcccactgcgaacaccagcggcgaagtataacagaaagtctatatccaagctcacccgttttagggccacaaattctttcagtgacccagcttgtgtccatatcaattgataaaattcacgttctgcgtctctgattccgcgttcaaatggacccccgtgtcgattgaaatgatcgtctccccattctccccctccgatgtcctcgtcgaatggatcaatctcatatgtcaagctaacatcaagaatctccagtgtcttcttgtgtgcacaaagcgctttgataaatgctttggggctgaagatagagacgctgccacacattctcgccgtgaaattcgtaagtatcttgcaagaccatatcagattcgcaaagtagagagagctagctgccgtacaagagagagagatcttgctgatattagaacttttttctttgaattcaagttttccatcatcaccctccttgtctccatgactgcggacggactcaattgacgggagagtgtcaaaaagcctcaagcagcgttcaaagtccaatgagaaacgaaaaccagcataatgtggaacagttgtctcggagaggtggagactacgaagattgcgaagatatgacttgttttcgggactggcattggcttggcgaaggagcttgacaagcgggaagtccattatattgctgtagctccggccacggggttggtccaccttcatcgtcacaatgttcggcgataccacaatcagaatggtgaccaaggcttggatgatgaatgcttcaccgccgacattgcgtctgtccacctgattagatggtcactcggagacgaagatcgaatgagattctcacctatgaacttttgctctttttttcataagcatattaaccactcgatccccttgcaggcttgtaaacccgccgtttctgagcgctttgcgcacgagacctatctcctcgttgctcaaatcccgttgaaatttgacttcctcgtggaccgtaaaccagccgtttactggtggtctagtggaatcgactttgcgcacgtaatgacccaaaataggtcgtttcaagatatccataatcatggctaatggcttgtcggtattttctgagcagatttgaattcggtaatacttcccgcgcgctaccatatcgcacagagagtgaagagttcgacattgtcttgatagagcagccacgtcatagattgaaagcaggtatgagataatccgatggagaacctcaaggggtagactgagaaatgacatgatttctgtactgtcaatatggaagggggggagggggaagggggttatttcaactacatttgtacggctttgcctctcctggtaaggtggctattacctaggatttgtcttggcattttgagaatttctgttgacaacaaagaagacgaagagaatgacgaaaaacaaatttgtcatgtcgtgatgccccaaaaatctgtcgttggccccgctggatctctccgcggaatgactttcctatcctggtgcgcggggatgtatattaaactccttccactccaacttgaaccattttaataacttcagtttcaaaatgactcaaatcttcctgtgagtggctttattcctgataaagcatgatccatgctttgctaactcaaattctagtaccggtgcaacgggctacattgggggcgaagtcctccacgctttgcagcaggcgcatcctgattatgaggttgccgccttgatcagagatgaggaaaaggccggcaaagttttggctgcatttcctaaggtccgtgtagtccttgcggatttggacaatgtggaaatcattgagaaagaatcacgcaaagccgatattgtcatccgtgggtcaatttacatctggtagcctgatgtatcactaaccttctccatttagacgccgctagtaacaagcatctcgaaagcgtgaaagcgatcgcaaatggcctggccggacgtcaaaatggtatgtcgtctactgcttcaatatcttctttcgggtttgatcgttaattgaagtaaaatgcagcctattacatccaagttaccggggctagcgttctgtcaggtcctgaagttgatagcaactcatatggtgagccctcggatcaaatcgttgatgatttggataacgctgccgatctccgagacaaaattcgggcgtacaaagatcgtcgggtggtggataactacattctcgacttgggatcagatggtcccaaaaccgccattcttttccctcctatcatattcggcactggtaacggtcccgtgaatcaacgcagcatccaggttccctcattggcccgggccgctttgctacaacatgttggtctataccttggcagaggactaagtcgatggggcattgttcacatcgctgatctggcggatctctttgtcaaattggtggagcatgctgtcaacgccactcccagtcctatttggaatgagaacggccttttctttgtggaaaacggtttcgaggttagttcatggcctaatatgtcacttctccgcgctaaccttcttgtttttctttcagagcttcaaagatgtcgctttggtgatcgccaaagaggcgtatagcctcggttacattgattcgcctgattcggtgcaatccatgaatctcgatgaggccaacgtagtgatacctaatggagctgtgttcctgggtactaatggtcaaggccgagcttcacgggcaagaaagctgttaggatggcaaccagatggcgagagcttccatagcgccacacgggagacaatcattgctgaagcagcacagctgcgatgatttctcaagcattgattgcaagttcaatccatgttattcagccaaaatgctatcattgatttcacattctttacgtaggaccagcgtaatattagataagaaataaagaaattttataacctttgcgaaaatattacgatggcatatataatctgtctcggaattctactggattactccgtactgatctttgagttctcatagatgactttgacaaaaatggtggaactaaaaagggactatatcaattgaaaaaccactagccaccatcaggctgtaatcaacccagataaccctcctccttcaaaatgcatatagcttcaacagcaattttatatccaaataagttgctaatcatcagcctggaggaacgaaaagtcagtgtaccgccccgccgccttgtctgaccgcctcgaaatttgccggactttactttttttcatttacgatttttatcaccgccaaacagccctctttctcatcacaatatattgctttctttgactcttctccacctcgtcgtcctcaatcatcatggcgactctggcggagaagcttgagaagattaagtctcccaagctgcagaaccagcatcacgtaagtttccctgttgcataccacccaatgaattgacactaacattcatgaacagaccgctgtggtgctctctgcagttgaggatactctccgtgatcaaaaagcagacttctcgcccaccgcatattttgctgctcttcttgcactgctctcgcagtcactgtccgcatcccagggtattgtcaacaaggacctagcgacatccgttgtctaccttctcgacatcacaaccgtttacgtccccgccccgatcctttgctccaaattttcccagatcctcgaaggtcttgcacctgcgctttctctccccgaggtcgaagccccgctcctgcgtccttcaattggctgtcttgagtctctgctcattgcccaggattctgcatcatggaatctcccgcacacacaggtcggaccgcgacgcgcaatggcaggtctactgagtctatcggttgaccaccgcccaaaggtacggaaacgtgcccaggaggctcttgtcaaggttctcaaggcgcccccaccgagcccgtctctggaccacccgggtgcggatatgtgcgcccagtctgcgatgaagactctgggagatagcatcacagccgcccacaagcaaaagaaaggtcgtcatgatgctcaggccaacaaccatgagccccttatcattcactcattgcagctgatcaagaccattgcctcggcgtcaggtggctggcccagcaagaagatcgaaccgctcagcgaacttctgatgaacgcttcccgctctagcaatgagtacatcactatgggtgcctttgaggtatttgaggtcattttcgaaggaatggcggatgaattctcgtcttcaaagctgccccgtcttttggatgctatctccgaactcaaacctgcgcagaatgactcccagcttctccccccttggattgcagtgctctcgcgtggttacgatgtggccgcacaaatcactcccgaggatactttcgagaagttgccggatctgttcactttgatttctggattcatggcttcgccttccagcaacatccgcgtttccgcatcagagtgtctgatctcattcctacacaactgtatccccaacagtgttattgtggatccatctgtgtatgacgagaagactttagagaagttgtctcgtgcagccattgatcttctttcggtgaagtaccaggctgcttggaaagaggtattcaatgtttgctctgccctcttcgattgcttcaagtggcgatcaagcccatatctggtcaagattgtctccaccatcggtgaactgcgcagcaatggcggcttccacggcaagaaggaagccgacgccgtcatcagcagtgctatcgaggccatgggccccgaggcagtattggagattcttcccctcaacattatcgagcagaaggctggtcagcccggccgtgtctggatgctgcccattatgcgcgatagcgtgaccaacacgaacctccgccacttccgtaccgagctcgttcccctgagtgaggcactgtaccagaaggtagtggactttggtgccgctgagaagtctgtggaagtgaagatcttcgaaaccctcgtccaacagacctggggtacccttcccggctactgcgagctgccccttgatcttgaggaggcatttgaccagacattcgcggagctgctgtctaacgttctgtacaagcagaccgaattgcgtctcgatgtctgccgtgctttgcagaaccttgttgagtctaaccaggctatcttgtctgtcgaaaacgatgaggacgatctgatcttgcaacgacgtatcaccaaggccgctgcaaagaagaacctcattcatcttggcggtcttgcgagcaatctgctggctgtattgttcaacgtctacagtcagacccttcctcactaccgcggctacatcctgcagtgtatcaatgcctacttgagcatcacccctgaaaatgtaagttgccttcagtcgtatgcaaatttacacgactaacacccttcataggagctaaacgaaactttcacccgcgttacttcgatgcttgaatcttctttgattaccgagcaagagacagcaaccaagcagagtgcttcggctcagaacccgtccgacaagatgccaccgacctcccacactctgattgacctcgttatcgcaatgtcaatctacctccctcgctccagcttcagtggcttgtttgccatggcggcggctatcctcaacagcacatcccccaacccggatcagcaactgattaagaaggcctacaagttgattccccgacttgcaacgaccgagactggtcgcgctgccctccaggagcgtagtggagagttgcaggctctcatgcttgccaccaccgataccacccctgcatctggccgtcgcgaccgtatgctcgctatcaccgagataatcaatcatctgcctacctcggacctgcatttcatcccggccatcctgtccgaggtggttctgggctgcaaggaaagcaatgagaaggcacgcacagcggcctttgacctgctgattctcttggccaagcgcacaaccgattcagagcgtaaccctcccggcactctcatccgcagatctcttgtgcccggtgtggcggacgattccccggatgcgcctgctaccctcgaggagttcttcacaatggtctcggccggtctggctggctcggctcctcacatggtcggcgccaccgtcactgcgctttcgcgtctgttcttcgacttccagaaacaactccagccggaaatgctcaaggaactcgttgagaccgttgagctcttccttacctccaacaaccgtgagatcgtccgctccgtccttggcttcgtcaaggttgccgtcgtcgttctccccgacgaaactctacgcccccgtctcagcaccatggtccccagcctcatggcctggaacaaggagcacaagggccgtctccgtagcaaggtgaagggcatcatcgaccgccttgtgcgccgattcggtgcccctcttctggaggctattgtcggcgaggaagaccgcaagcttatagtcaacatccgcaaagcccgtgagcgcagtaagcgcaagaagagagagggtgccgaaggcgaagacgaagacgaagaggagaaggcctccaagccccaagccggcaacgccttcgacaaggccgtctacggctctgactcggactcctccgacaactcggacgacggcgacagcgacgtcgacgtcgacaacgtcgcccaaatcaagggccgcaaccccaagaaaaaagcaggccagagcacccagtacatccgcgagatgtcccccgaggacaatcccctcgatctgctcggctccaacgccctggccagcatctccaccaccaagcccagccagcgcttcctcaacacaggcccgggctcaaagaagaagcagcgcaatgccaaggtcgacgccgacggccgtcttgtcctcggcgatgacggcgatatcgtcgacgacgtcgagatgtccggtgctggtgacggtggcgtgaacgcctacctcgctgctgtcagcggacccgatgctgtccgccgtggccagagaggcaaggtgaagatgggccagtcgtcgaagaagaacgcaggcgatagcatggatgtcgacgaggacgacctgaagcaggacctgcgcgcttccggagccggtcagagctccggccgtcgtggtcttggtgcgcccaagacttccggtgcgtctggcggtggtcgcgttgagaagcgtcgcaatccaggcaacgctcctcgcggtggtaaccgctcgggatggggcaagaagagataaactatttactctacggtgaatcgtatattttcttgccggtacggatactgtaagtggagaagagggtggcatatagcagatcccggagttatcgttctgagttcccttgtttttgatttttgatttttttgtttctgccatctggtcttcggtccctgtcgtgcttggttagtgttgacgttctcataataccctccgctgtggtgattccgttgactctgggctttttctgtttcgatgcagagttattgactccgtgtttttcatgatatgattacgattctattcaaaagtttctattaggtcaatggacatagatattgttttttgtgtgtggtctatagcatagatgagtagctttatatttgacaccatcacgaatcatccgatatcacatgacactgatgaaatgctactaaatgtacaactacagctagttcaaataccagaacccaaatgcaatgattttatcatatcctcatttgcaaagcagttatcatgcaaaaaaaagtgtatcgaacatatcaatcagaacttcatgaacgcgagccagccaaccaggcagctcagcagtatttcccacagcatccatcgctcgctccgagaagtaaaagtagacgtagatgtagagcgcgacgcaaaggggacagacaacaagaagctgcaagcttagaccagacggcatcacatccatccaagcgcatagcgtcgacagcttcctttcctcgcagtatacagcagacaggacagtacagtacagtagtagcagcccactgcgagcatccgaatccagccaaaactcctgccgatgcaatttgcaattccaaacgacgaccgtccgtatccgcacggcgcgaaatcaaatcgacaccgtcgctcatcggaggtcatcgagcagtttatgtcctaacgcccctttgttctttttccttttccttttcaacactcggtctttcaacggtatcaacccgggagatagagaaagcgataagtcgacagaccagaccagatcaaacacacaacaagcacgtggtgacaatgcgataattagaacagaatctccccgctgtgctcgggctcgaaaccgagcgcttggagttcgtcgtagcgcttcttgtcgcctgttttcctctttgcgtcctctttcttcttcagctcgaagacttcttcgaatggggctctggtcagtgtgggcgggatatcgtcttcgcggtcaaggtcctgtgtggaattgagaatgcgtgagcggggttcctaccagtataccttaacttgcagcagggattgaggagatcataccacttcgcctagcaggagcacgttctctccacgaacaatgaatatgccacgtgagacatcggcgtacagctgtccggcgtagacgcgctctatagtatcctggaaaacaaggttcgctagaagatagcatgtcagataaaagagcgagacagattcaagagtagtgcgactggcataccgaactggtcccagcttctgagaacgccgataagtttgcggccgtcgcgaaggatgagtacaagtttctctgcgattgcgtcagtcttctttctctcccttgttcttcagctctaggccgcttgagtgcagctgcacatactatctgttagatcgagcagctgtgcggcggtcgtgaacatctgcgggggtaattgcggcgggccgcctgttggctgggggcctgctgggccgagggcattctgggtgaattgttggttttgctgcggggtgcgagaggccggggcagggctttcgtttagagataggcgctccatggcgttgtctgtgttggattggcggagggaaaatcggaaagcggtgtggaggggtagggagggaggcgggaggaggctgatacagagagattcaggaattggaggtggagcttctcattctgtttctgatcattcgcgatggagggatcgaggtcgcaaaggccgtcatcacgggcggtgagtttgtcttgtttgctcggggctgctctatacattttggtttttgatattcttctgagacataacatactctatggaagaaaaaaatacacttgccagttctaagtctgaagaaaagtacacgctatacaaaagcgaaagggggaatatccaaaaaaaaaatcaaaaaccaaaaaccaaaacgcgtctatatctacaacaccccgacacccctctgctgccccctcatcctctcttcccgccgcttactatacggcgcacagtacggctcatccgcagatccaatactagccctaaccccatcctgcgagcgatggtaggcaggactcgacggcgcaggcggcaactgcatagccttgaactgcgcatctgtgataacgcgcatgccatacagataccgcatgagctcgaaatccggccgactgcccgcaagcgtctggccaagacagtagtggtcagcagcgacgtggtcgagcatacgatcccacgccgagggaaagtctccagacaggggtcgaaccgcgtcatcgctagagcggatcgactcgccgtcctcgagaaccggcgacgacacggggtccgaaatcccgtccacaaacttggtattcggacacagcggacaccgcgctgacggcggcgtcgggtacgagcgaaagtgactgacgacgtgggcgcgccactcggcgctgtcggcgaaggacttgtggcagtccagcatgtggaagaggcacgcgtatgtgcgctgctcggcgcttgtgctcgtgctggctgttagagaggggggtcttgacggcgagagagcggggtcggtggttaacggtgtcgggtcaccgagaacgtagatcccgagcccatctgtgctggtatctccctgtgcggagtcaaccccagtcccgggcctggtgtcaactgatgatattgacggggacggggatgcgctcgacaagtccggcacggcgggtgaagaggacatggcggtgacgacgacgcccggttgctttcgcttaggctgtctttgcgacagggcgggggtcctacttgaagcggtgctgctggcggtcgaactcacgctgatactgacgctgcgggtagaagacgatcggcgaaggtcgcgatctctatggcggtctctattgcgtgaatagaggagctggtcgaggtcgcctcgacgagagtcccgatggtcctgggggcttgtgggcttgcgctccgacatgctcgatgcaaaagacggggaggtctagtacacggggtggatacggctggatcgtgtcagagtcaggttacccggggttacatagcaataggagtagccttcgacgggtagagttagaggtatgtataggattagggaggagaggagaggagtaagtaatacggatgaggggaacgggatagaacgggagatacatacaccccaaggatccgatataagatcagcagaataccttcagatctgcactttttcagcatgcatgacatccatggccgttctgcgcgtacaatgtagacaagggtatatagaaatgggctgaagtgggggtgcggacttttggatttttttttctgaatcttagggcggggcaattggggctagttgggctataaggattcagatggctatactatatacactatcacctggatttgtgtatatttctttacctgtctttgttggggataggtctgagatacaatgcacgggcggctgtctgcaggttgttttcgttggatagaggattacgctttgggaagtacaacataggaagtacaagatgtattcgccatttgtggatataagattatataaaagatcttcatagtctggacctagaggaacatcgaatatctaggctccatggatctacgttagtattcttcacaagtacgaagagcagggttgagaaggaatctagatcgttggacgtgttctagacaaagattcagttgacatgtgaatgtatctttctgattctattcttggagataatggaatagagttgcaatattgtttcagattcgatgtcaaagacatccgaagtattcagataatactaggctgtacagcatacatcgtatgtagatgccaactatacggccaagtgaattgcggggagatatcacatgcaaataagccaaaaccgatacaaagaattaagagtaaatgtcttgatttgctcacaatgtgaggaattaagtaagtgaagagaagtgaagtaaaggaacaggttcagaagtaaataagaccacaggcctcgggagaggagaatgacatagaaaagtaggtctttcgacacgaattttgaactcgaagtaaaaaaagaaaatctccagaggagtgaccagccaggggtaaaaaaagatcccaatccgtctatttggtggaagcgccagagataaaatcaacaaacccaatccgacaccgttgatgcccgcaagccaggtaaaaatgcacaagtctatatcgtttcgtggcgcgcataacataagttttcaaggcataaaaggttgcaaagaagatgagttagaaccggtctgccaggtccccgccagcaacggaattggtggctgacgagttcatggaagaaaatccggccgcggggttgagcatgtcctgcaccgcaaccttgggaatctggggcacgggcaacttgcgctgtgtgccgtcgggtttcgacatgatatcggagatggttgggcccatgtgcccctggttggggctgtaataattgggcccttctggttgcggctccatgggcgcgagatcaggggtgtgctggagagacaggtggcgaatcgaaggcagatgcagctcgctggcaccaagagggcgcagacggggcgagtgtgcaggagtagccaatggagtgtgatcaggggtaggggagagagaatcgtgggagaaggtaggagaaggagcggtggagttgggagagttgggacgagagcgcttgacacggtggccatagccatcatcgtcatcgttggaatgcgaacgggtcatgttctgcgaaatcgcatatgcggagagcgaagggaggccacggctagtgccgtgatgacgggagccgaaaatctggtgtccccgcgagccgtggaagcccatgtggtcatcacgctctacttgcgacgccgctgtagccaggagattgatatccattccggaggaagcacgctccgcggtgcgggagtaagggcccaaattcgagcgcatgtggttggcgtagttggagaaggagtggggaggggagacatccggagatccgacctgcgatactggcgcggagcgagtgataggcttgctaggaggtggcatcatgttggaagcattcattccggagtcttggcctgcggcggccgccgcccccnnnnnnnnnnnnnnnnnnnggcccgcggccgccgccaggtgctgagccttgttactgcggcgcgagttggggttgttgtggatgcgcgaatggcgagttagctcgtctgatcgactgaagcgtttcgtgcagccggggaactggcaggcgtgtggcttctcgccggtgtgcgtgcggatgtgtctcgtctggtgctccaggcggtggaacgcacggtcgcaaaggggacacttgtacggccggggcaggtcctggcggatctcctcggtcgcggggcgcgcccccttcataagcggcggtaacaagctcactgaagaagccattgaatctccgctcgaggatgtgtcggattcgtggggattaagtagatttgagaatcccactgaagaacccggcggtggcatgtgaatccgtgcggcggattgatgggtgatactgaaaggaggaccgagaacgggtttatcgcaggggtcccgagctaaggtcgatcagatacccggattgggatgggaaggtcgatcgggaatcggagtgcggcgggaagagttctgatagctcgggttggttataaaccacgtagtcgagtagtgcagaagcgggagcaagagggaagaagaagggggaaaaagggaacctggagacgacgatctggggagtcacagataatatagggaatggagggggaagggagaaatcgggggagaaggggcagtgtcggaatcggacttggagaaaagaaaattctgaaaaaacgcaaagcaaaaaaacgaaaaagaaaagaataaaataaaataaaatacgtccaggtaaaaatgtaaaaatggagagtgtgggggagaagaaggggagacatggggcaaaagaggaaaaatacaaaaaccggaaattcccaaaggggaaatgggaaactaaaagaaataaaaaagaaataaaaaaagaaaaaaggacggtccttactggatgtacatcaacctggctatgtactatttaggatagataactgaattaactaataactattccaatataatcatattccgctactctctaatattcttatagtattgctgtggtatactaactacgtaactgcataaaacaaaaatgtggggactcgcattttgctgaagaaccgtgtggcgtgaggtgcgtgtccctatccggctatcgcgcctctaacaattcttatcagaacatggggggagatatcagcgctatctcgggatgacgagcaaaagacagtggatgagaaaagaaatggtggcatgcggagagccgatgacgagcagaacccggggtcgccagtactcaatataaaatgatagatactccgtgcttccgtgctccatagcaggtacggagtacatagacatagtcctgcgaaacccagggccaaagtctgggggtgacggtcattctaggcccgaccagtccaggcccatgtacaatggatgtacaatggagatcctggggaccatctgatcccgtcacggagtgacgatagcgaggatcatcgatgatgtcgaccgaaacgaaacgcccaagggttaattctggtaatcatttagtcatgcgaacacaacccagtcaacaggtcatccaggcatccagcgcgaagacgagatacgaaaatgattcgggttgttcattgctcaagacttcatcatccggaggaatcatccccgaaccctatatatcgaaaccctgggatcaaccctgggatcgtctgctcaggttcgccgacaattcccccggattttggggtaagatatgacgaatttatatacggagtacatataattgtatatttctttaaccgactgatatattgattgtggaacgatagaaccaacaccgctgataggcgcggatcatccaattattgatagccccgatgcagctgccatgcagccgcaaagccgcgtatctctagatgccagtgtcagcccctgcacaatgcgcactcggctgtattccttgcgcaatcagacggcggtatccctgactgccaagacgcctaagtatagaccccgggggttgatttcctgaatctcacatcagggtattaaccggggtctggggtaccggttcaagataatattaattacgcttaacaggtattgaatattctcctatcagcgatcgagatatcttcacgcttcgctaagaaggcaactataatacaagattacatactttcgcccgaagttcccccggcttaatggaagaaaagggccgaggtgcgggataaacgggacggggcaaagatacgcccactcggcaaggccgtcccgccgagagagtccggtttgcgctggaaggcgttatctttgggtccggcatagcgttactccgcgattctattgtatgtgtaggcatattgatttgatagatacacatacatatacactaaactttacactacaatacatatcaggggatactccatcttgcagggtctagtggcggatcctaacggaagttttacccccgggcaaattcactcgatccccacagttcacgatggctaaattccttggcaaattaggaccagcacacaaacgcaaacctgaaagcaaagcggaaagataacggagtatcagggcccagatgcctatgttgtatgccggcccgactaccgagctggtactttttgatcggggatctagaaatcgcacgaatccctgccaggtttaagaaaatacaaggtaaaatgagctcacaatatacccgacggtacggagcacactgccgcaacctggagttctccatttttctccacggggaataatggcgccattctggtcaaaggccggactcggagtggcaataatagcggtcttttgttattcttcatctcaagaagcaggtaccgtctcgaagcaatgacccgccttttgccgaatttgcgacgtgtacggagtgcatttgctaggatcgtgaaactaatgagggtttcggtttcaggtgacgaattcagatctatcagttgatgtactcctcgtgcacctgctggaaatcggaatattcacagaacagatatccggattcaaagttccgacatatattcctgaatccttccccagaactcgtctcacctgccccgattctcacccagatccgcaaacctacgaactcgatcctacctgtttagtacgtagataagtgccaggtgggggacaccgaaaccggcagttccaatcgccgacagtcctaaatcgcaatatcacgacagaacctcatcctccggtcttgaaccggtctgcgccccagaaaatccaacctattttttagaatgatcgacaaagtttatcaagccgatatacccggtgatgaacactccaaaacacacagataagcatacaacatatacacacatactccataagtcatcctaccccacaatctccaagtgatagccatggggagagacccgaaaccgtagaatcgatctgcgatgacatctcaatccaaatctgccttgatcaccgcgatcgccttgaatacgatcatccgatatcgctgtcgtcatgcgctcctccacacaaggtcaaggtcgatcgtcacgccatccggggagacgggagactggcaatctacggtagtggtatgtaagctggatattagacaatggaattacctatattgtacatctagcttgcaagtatgtgggactgtattgatgctccatgggaattcaatcgggattcgtcactcaagcattccccttcccacttttccttgcccactatgctgatcaatcccattattctggcatgcagacccgcgcacagggcgggtacgtcgatcctggatggggggaaaaagcaaaactagtcccaccaccgaaaggggacgaggtagagagaaatggaaatagaaatgtaaataacaacggcaagggaaaagaaagtgaagggaatgagtatacgcaatagtaaagctcgattcgggcgtggagatcctccggactccctccgttatcagttggagcctcgttcagttgtacgcggggaagtcctctttccatccgattcagccctcagggtacctattttaggcaaaatatcggcgaactagtgatatctatttctattccccgcacccacacatatcgttatgtaagatcactagtagtgggtgaggggagatgaaatacttttatagttattatattaccctattattcataccctctggaatactttccagggtaaggcagtaagtagcgtacgagtccgagtctggacgcgcccgtccctttcagcccacacccccttgctacataagctcagcagttgctactggctgtacgacatccaagttccaacacggtgtgagtcatgacgtgacgtgctcacggcccagctggggaataaccaagttggaagctgaaagcgaaagcgcgtaggaaagtcaaaaagaaaagtgacaggccaactggcaacaagggatcggctcttgttttgcgctccgtttccaatcgcgctgtcttttgtctgaaacccctatcgagaggtgtcattggtcgagacaagatggagttaatttagttacctagttacgttatacgttgcaaagggaaggcgatctgatacttcaatatataagtatggtacagttgtatgccattgtgtctcaaggtgacatttctttatgcttggcaggtctcgatgcgggggagtagtttcacaatggagaatccggggtagggttggcttgagtaacattccacaaaacccaggaatgctaggaggtcattgcgggtgcggttactctgtggaatatacagcggggtgtagactacataggtttcccaaacacacatgctaaagaaagtgcaaccctaatcagctcggaggttttgccagcgcttacctcacatcctatcaccactcactctccttattgccccaactccggacgatcagcgctccacaccttctagaacaaactacctcgcagcacccaatcagcgtcacgaatggcctcacactgatatcaccctatgcggggccgctattccgcgatcaggccattggtggaaagacggtcgattacactatcttacaatctctgtcctattatctggagaacatgtgatattctggggaatagatagcgaaacgaagagaaaagagaaagtcgaggcggggaaaaagggcacgataccgcgtccagttcccggtgaagccccggacacccctccaattccaacatcccacgtcgagggggagaacgaaaaaattttctcttccaactccactgagcgatttatcgtcatttcttaccccatattcgcctaacgttggataatgcaacccactcgcggatgcggttcacaatgcccctgtcgcaagatccacattgggcacaggtgttgtgtgtacggagtaccgtcttgaaggcgctataaccaggtaccatatgcaggagatcagttagtctgagatgaggcagatcctagcttggatttgcattccgtaaggcactagagaaacaggggtaagggaaaacaaaggtgcggagtacgctgtggctaccataacgggcgcataccccgagctaattaagcgaattcgagctccaaaccagcgcgactctcgctggcacgtgtacctatgatattatcctttgttagatccttgactattggaaacgggatcaaaagtataactgcgggagctccggactcttgtcttccctattgggagtatcataaagcgggggggtctagatctgcacggacaggatagttagtttgtagcttgtggatttcacatgtgaatgcgcgaatcgtatgttttgatctcgttggcttcgagcttggaatgcgggatgtggaggtctgataagagtaagagttacaggaatgcgcccatatgcgcccataggtgcatgactgccttggttttgctgtgcatgccttgcattgtgcaagtgttagctacggagtaccttcgggagtaacgaggcgatggcgtcattgaaggggggccatgtgttttctccagatttggtacggagcgcattgataagggattggacgtattcaacacgtcgtctctgatctgggaagggctatcttactaaggatgtggtatgtggatgacgacagagctcatagcctagatcatgcaggtaccacaacatcagtccatagaccatagggctagctggctggacagcgacaaccgggtgatctcggaggacgacatggtgacattctcgcaggtttagggcatccagttgcggggcttagtgccgatatgggaatctcccctccgctttacatattaggaaggtctgccatggcttggctctccattttcgcctatagacggagctgtgtactttgtgggggatagtgcgagactctatacagcactactccgataccctcgatggcaaatttggcaaattcaaggaaatcaaattttcacggagcaaccgctgagttgagtatgtaaccgcaattcaaaaaggggctcggtgagacttcaatttccttttccccgctggagcctcccgatttacgcaactcgggcgagattctttcggcatcgccgtgccgattcgggctctttggtcgctttgcctggccgccgtgccggtttttgtctgacgccggacacgcgtattgcagtggtactctccacactgtccacacctattcttatcgtcccatacggtaagtgccgtaccagcgttggtgcctctccttttgagaaccatgaccgctggaatgccgccacaccccgagattcctccgaggctcggaagttgggagtctggggtgagccgtgggatgatctgcatgagtagcgaatgcaggtaatccactagggtctcccccgtctaatcgcattgcatttctctgcattctattctggtggatggagtcctgcgtactccgcaagcctcgggatgggagagcctcgggatagcgggatttcttcggatattgggaggtaattcttgtatcctgcttctccgggttttgtatacccagtctactccgcatgtagcggtgaggccccagtgtttcaagtctgataggtaggttgtggagatcgatgaaaatttgctgtctgtatttgcctcttgaggaaatatcaaatttaacaacgcaactattgaaagcaaattcgatggtgtcgaataccgtctaaatatactagccaatatccaaacttggagggtccaacgtaactaatgcgcaacgctaccaatttcatgaatgcatgctcgtttgatattaacgaaaataagcattctactgatgtcatttataaccagtcacctcttggcttctataagcaactttttttgtagccctaatcttaacaatttgccctatcaaaaccctaatctggcgtcctcattctatatcgagactcgaccaaaagcatgagcatatagtggtaatccaattggcatcagatagatgtccattccatattgagattcggacgcatcagtctatgacacgtcggctggtaagtttctgctagaagtctttatttccaagtattatcttctcttcttctcactcaactgatacatggcgttctgctctttgtttccgctcatcccatttcttataccatgccttctaaactacgttagtcaatccccccgaatgttgtaaagggggtgctggacgctacccaaagatccctcatacggattcttgcagaggccaaggcctcaggctagatgaggcgcaacttgaatatatgccgcctcaagctagctagtcagtattttctccgctataaggagaattatgagcgatcataaagatcatactaggtatgtcatgcaaatatctcccttccctctgtccaaatctaattctataaacagtataacgcagcattcttgcagagtacccctccataaccacggatatactgtacagcgatgatggggtgactgaaggacctctacacgcacagaggtacaggcttgatgggacaccagcttcctcccccgagcaccgatctaggggcctggtgccacaaatatccctcaagtaccccgggccaagcccgaataggcactggtcgtcgggactcctcatactttctcttgtagcggtggtataacttgccgactgcccaaccggaggcgacatccacgatgctcgccacccaacttggagccttcgcctcctctacaaggatccgtacaagggatctttgtgtggcatccaggactcccttcacagcatccggggggatcgactaacgtagcttggcggacatggtataagaacgtggatgagcggaaacaagaaagcagaccgtcatgtatcagctggggacccgaggaggagaagagagaaaggaagagacggagactcgagggaatttactgttaggactagctaccagcgtatcctgaaaatggaggttcgaattagagtggaggtccccagcgtaggtcatgcaattcagtagactaatcgctaaggttctaaatctcatgtgcgcggtgtatatatacccctagcgcttacttagcaagtacgtcggcccatacaggccagttgtataagtgaccctcggggtcgtaacattacccccctcctttgtgagctgcgtcctcgaagctcttggcatttcctttgagaggcacttctttaaatgtgcgttctttatctcagtatagcgacctcttcgccagaaaatgcgctataatagtaactcctaacttcctcttctaccctccgctatatccaactataacccttaggtcttcactgggaatcctgctgcggcctggtatatacaatgtataaatcggatcagcgctaatcatatatatatctgtatatcttacacgggatctcagggtactaaatatacctattacataagccttcggtaggtttatattatggtatagaggtcctacttcttcgtatagggcgttactaacctattaggttaatctatacctagatacgattgtaaatcgggctatcctagtaccttctacgattagatctcagtaatatactcgaaaagacctagttagctatttctgtagtacgcggctggtacttatataatctatctcctataggcttataccccctaatatacctacccttaggctatcactgctactagctaggtagttaccccttcctccggctcctctactatcttctctataggcccctatatcttacttgatatactcctagcggtccgttataccttagatataggctcctatatagaatactattatagcctaggtagtaatcctaggatttacaggaagtatagtgatataggaaggggattatcgaccttcgaccctctaggtagcgatatatcctttactataatacttaggccttatttctatatatctttagttaatagcctacctatagtagtggctataacgcctctatatactatattgtccctaggctatttatactagactcttagccctacctcctatacctactattatataccttctgtattatattcctaccgatatatactgcttcttacagtatcttcgcggtcttaacttatcttcttcttctttataggttacccccttttagcttttataggtagtcttacgcgctcttcttttttaaactgatctaatatagtagtttcttctatatacacctaaggttcctatatattcttagtatctctatagcctttctatttaactaggtactctgcccctttatagcggcttttaaggatatattctataatatannnnnnnnnnnnnnnnnnnnncttactattatatctaagtagactattatctagccttatattctaggctgtgccttctaggtagccgccctagccctattagtctatttctataagtttcttttacactaaggtatctcttatctataccttatatataaagtcccccctaaacaaaaaacatttgtgcagaggcggccatttctggcctcaaagggggccgaaagtggcctcctcggcacagttcttccgcacacgcactttcggtcccagagccacgcgctcctcgcctgccccttgtaacgtgcaccgtcacgttcttgttcgggtcatgttggtacctgggcgcgtggctccccttcccctgccctcgagccccgctcctgctttccatcgacttctagccacctccgggcctgctccttgagcgctaccatgacacctccgttttgtgaggtcgccaaaaatggcacactccatcccaggctcattggtcgctggggcaatggggtccatgactataaagctgccaacagtccctcctcactctcctacctagccctcctctcacctatcctttgccagtccctccctcagcgcgtgcctcacagccgttcgtcatccccgttgatttgtctacctgcctggagcggcttcgcgcacatcttagttttcccaaacgcagcatgagcgacgttacaaatctattctctgcgaccgatagtgacacttccggggagtctttccagcctgacatcgatgcgaccgatgactccgattctgggcaagcctcaaattcaaccgagctgacaactccggaacccacctgtcttcctgacaattgtaacaggccttccacccgtccaaaacgacccgtgcgtcgtccagcggacgctggtgttctgcccgatttcagcgatgaccctgatgacgacacggacgaggacattgcaaacataccacttgattatgggcgctcagaacaaaccaaggttcggggtcgacgaatagaaaagcgctgggacaagtgagcatttattcagacctacgcaattgggaggcgattactgatgtgaggcgtaggtactgccgagtgaaggctgctcaggctggtgcgctgttgaaatgggatgatccagtggaggcactacgcgaggttactcctaatgatgtgcatcgttttttcaactactgcatgaagctgaagtatggcgaaggcggtcgtcatctgaagggaacatcgaaagcgagcgccctgaaagctgattggaaaggatttcggggttactatcggagaattacacggaccaggataactgccgaagatagcgaagagatcaatgcggtaagttattcctcttagtctgacgctcggagctgactgggttctagggcattcggaaactcgtcgataaattcgacctcgatacacaagaacggggcaaggagccggtgtacgtccaagacttgactgaattgaacgagacgatcctccgaactcaggaaagacgatttcattttggatacgagcgaatccagctctgtctcttcaacatgctcggtatttataccgtgaaccgtctgcatgctcttctttcgctacagttccaccatctacgtttctccatacaagataatccggacgggggccctcccgtacttttggtggagatcaaatcggagcatacaaagcgattcctcggaacttcccaaatgtatgtatcgtgcgttgaacccgggtaatgatgatcccaatattaacactacttcttagtaacaattttcctttccctgaaatcatcaacgatccgtcgcttgtcttcagccctcatacatttatatttggtatacttctttggctccaagccttcgaagtccctacgctttcctccatggagcgcctccgaaagctgttcgtccaaggtggccgacaacagatggaactacccttgaagcgcgaagtcgaaggctattatgtcttctgcaagacagacgtgatcaatggacgtgcggttcttcaatggaaccagccgatgacagagggcgccatgtctggacgcctgagaaatctgggggaaatccacggcttccttcagtcaatgttcgcccatcgttttcgctatggaggggggaagatgttaaacgaaagcagcgcggtcagcgaagcacagcaaaatctgatcatgaaacacgctgacacccgcactttcttgaatcattatcttccacgacacatcgacaccgatatgcagaacgttatgaacggccgcgaatctaacaagtctctgatgcgcgcgatcacccggatgagtaggtggattgacaagagacgccctcggcatcttacttcggagcaacgagcgtcccttcgcgaacatccagaatatgtcgaggccactcggcgaatgagggagcaagccgaagagtgcaaatgcgagcctagtgcagcgatgcaatcgcgattagagaaactgacacgcgaaacctccaatacattcggccggttggaaagagcactgagacggaaggtgcgctatgagttcgaccgcaaacaggccatcatagacattgagcggcagctctcgggggctgctgttgatgacgaagaggcgaagaaggtacttcaagtcgaagaccagatgctaccggagcagattgatcttcttgagaaattattcacatggcctacctctcaatccctggaggcggagtggcaaagaaggaacgctgccgtggctacgatctcccgatactgtggtttccttgaaggtgggccattgcgtgggcgacgtaaacgggctgcaccaagtgacgggttcgatgaagaacagaccagcgtgttgccagagccagccaagaagggttgcagctctccggagccttcgcagcaggatattcttcttgtgaaagccaaaaattatatcaaaaaggccaagaagccccgccgatgttttcaatgttatggtgacaccgaacttccaattcatcgccgcacgcagaaatatagcgaatataagtcgactctacgacactttcgagagaagcacttgcaggatcgaaggtgtcatatgtgtgacgaagatctgctacatgagatgcatcttcgcaggcatgcagaagaggttcatcgcctcagtactgaacggaattactacgccaaagaagacacgggatcggacattgataccgattaatcgggaggcttgcaggttttctgtcaaatttaagaactctatcctttttttctttgcttggccgtttccagtcttcgagttaaacgtccaccctccctgtcttcggcagcagtctggccctcccatgtagccttacacaatagtgatgcaccataaacgccagcaagttacacgtcattcttataagctagtggctccaggaactaaccaaaattccccggagctttagggctgctagcaggatatcataattaagcaaaagcccctttgggtggaagagattccaatttaggctagaagaatcccgtctgttcgcctcttcctagcattgcgtttccctatttcctggctgcagagtaccgttcccaggagattgcggaacgggacatggagaagagtaatccccagagtatacaaactcacagcgacgaccgaagacttcctcatcaatactctcgatcatcgctggctcaagggcctttcttggaaaagaaccttaaaaggcctggtgaattgagaactgcttttatttttaccaacgaaaaatgaacgacatcagattgcaggactctgcgcaattgttagggattggaacaatctttgtctaaaagacggcaacttaattatgatatgcaaccgcattatgtagagagtattcagagatagaaagatatcaaggcggttcaatagtaagatagtagagagagcacagattttcttcgatattctttttacagaagaggattcctctggctctttatagttatcggctaggccctggctctgctttcagtcaccgtctagcgtccgcagcgctgttatattgtcgcccaatgaaagctactgcggagacccgctcctacagcaagctggtaaggaagtaaaaccaatcctcactgggacaacgtggctgtctagctgagaaccgtcatctaatatgggcgactgcgaggtctcacacaaatacgggacactcacgctctatttcccagcgctcccagcgccccactcagatcgcgctaagctgaattgggtcggggaaagccattgttttctgggacatgatctgggaaacctttgcaagcaacaaatcatgcatcctctccagacgcgccaattcattctttgctacacaacaacgtggaataccacaatattagtttccactttgcatgtgtctctgtacatgtacaatgaatctccgaactgggccctagtctctactcgggactacacgtggctccagaatgggtcccgtgactttctaggtaccgctgaagtatgattggctctgttgtccttgtagaattgcactctggaccacagccacattttagcgcctgctcccctctttctttcgcctctccacgggaaaatgcatgtatgaaaggctcgcaagaagctatgtagagtgccaacctcgcgcttacaatgtccaagtcaagttctagtttccgtgacatatcatgccttgagatacagttacaatgcaggccgaaagatttaggtcagttaaaggagtctcatgcagtagcaatgtacgttcttggaccccgcattcactttggcgcctcggcaaagacttgggaacgcaccgcctgggaactctccatcctcttttcatttttatgcgttgcgtaagtcaccaaaagggaagaagataacatgggggccaacgcagcatctacaacggtccaagatgaagctgctcatcaatccaacgaagggaggagcagaggggaagagctttcatctaggacacgcgcgttctggagccgagagacgtgagtatgtcagtcttgaaatcgaagatggatgctgactgcagatttaaaagttttactggttccgcaatcttcaacctacttgccttcgccccacccgccggnnnnnnnnnnnnnnnnnnnnnnnnnnnnnnnnnnnnnnnnnnnnnnnnnnnnnnnnnnnnnnnnnnnnnnnnnnnnnnnnnnnnnnnnnnnnnnnnnnnnnnnnnnnnnnnnnnnnnnnnnnnnnnnnnnnnnnnnnnnnnnnnnnnnnnnnnnnnnnnnnnnnnnnnnnnnnnnnnnnnnnnnnnnnnnnnnnnnnnnnnnnnnnnnnnnnnnnnnnnnnnnnnnnnnnnnnnnnnnnnnnnnnnnnnnnnnnnnnnnnnnnnnnnnnnnnnnnnnnnnnnnnnnnnnnnnnnnnnnnnnnnnnnnnnnnnnnnnnnnnnnnnnnnnnnnnnnnnnnnnnnnnnnnnnnnnnnnnnnnnnnnnnnnnnnnnnnnnnnnnnnnnnnnnnnnnnnnnnnnnnnnnnnnnnnnnnnnnnnnnnnnnnnnnnnnnnnnnnnnnnnnnnnnnnnnnnnnnnnnnnnnnnnnnnnnnnnnnnnnnnnnnnnnnnnnnnnnnnnnnnnnnnnnnnnnnnnnnnnnnnnnnnnnnnnnnnnnnnnnnnnnnnnnnnnnnnnnnnnnnnnnnnnnnnnnnnnnnnnnnnnnnnnnnnnnnnnnnnnnnnnnnnnnnnnnnnnnnnnnnnnnnnnnnnnnnnnnnnnnnnnnnnnnnnnnnnnnnnnnnnnnnnnnnnnnnnnnnnnnnnnnnnnnnnnnnnnnnnnnnnnnnnnnnnnnnnnnnnnnnnnnnnnnnnnnnnnnnnnnnnnnnnnnnnnnnnnnnnnnnnnnnnnnnnnnnnnnnnnnnnnnnnnnnnnnnnnnnnnnnnnnnnnnnnnnnnnnnnnnnnnnnnnnnnnnnnnnnnnnnnnnnnnnnnnnnnnnnnnnnnnnnnnnnnnnnnnnnnnnnnnnnnnnnnnnnnnnnnnnnnnnnnnnnnnnnnnnnnnnnnnnnnnnnnnnnnnnnnnnnnnnnnnnnnnnnnnnnnnnnnnnnnnnnnnnnnnnnnnnnnnnnnnnnnnnnnnnnnnnnnnnnnnnnnnnnnnnnnnnnnnnnnnnnnnnnnnnnnnnnnnnnnnnnnnnnnnnnnnnnnnnnnnnnnnnnnnnnnnnnnnnnnnnnnnnnnnnnnnnnnnnnnnnnnnnnnnnnnnnnnnnnnnnnnnnnnnnnnnnnnnnnnnnnnnnnnnnnnnnnnnnnnnnnnnnnnnnnnnnnnnnnnnnnnnnnnnnnnnnnnnnnnnnnnnnnnnnnnnnnnnnnnnnnnnnnnnnnnnnnnnnnnnnnnnnnnnnnnnnnnnnnnnnnnnnnnnnnnnnnnnnnnnnnnnnnnnnnnnnnnnnnnnnnnnnnnnnnnnnnnnnnnnnnnnnnnnnnnnnnnnnnnnnnnnnnnnnnnnnnnnnnnnnnnnnnnnnnnnnnnnnnnnnnnnnnnnnnnnnnnnnnnnnnnnnnnnnnnnnnnnnnnnnnnnnnnnnnnnnnnnnnnnnnnnnnnnnnnnnnnnnnnnnnnnnnnnnnnnnnnnnnnnnnnnnnnnnnnnnnnnnnnnnnnnnnnnnnnnnnnnnnnnnnnnnnnnnnnnnnnnnnnnnnnnnnnnnnnnnnnnnnnnnnnnnnnnnnnnnnnnnnnnnnnnnnnnnnnnnnnnnnnnnnnnnnnnnnnnnnnnnnnnnnnnnnnnnnnnnnnnnnnnnnnnnnnnnnnnnnnnnnnnnnnnnnnnnnnnnnnnnnnnnnnnnnnnnnnnnnnnnnnnnnnnnnnnnnnnnnnnnnnnnnnnnnnnnnnnnnnnnnnnnnnnnnnnnnnnnnnnnnnnnnnnnnnnnnnnnnnnnnnnnnnnnnnnnnnnnnnnnnnnnnnnnnnnnnnnnnnnnnnnnnnnnnnnnnnnnnnnnnnnnnnnnnnnnnnnnnnnnnnnnnnnnnnnnnnnnnnnnnnnnnnnnnnnnnnnnnnnnnnnnnnnnnnnnnnnnnnnnnnnnnnnnnnnnnnnnnnnnnnnnnnnnnnnnnnnnnnnnnnnnnnnnnnnnnnnnnnnnnnnnnnnnnnnnnnnnnnnnnnnnnnnnnnnnnnnnnnnnnnnnnnnnnnnnnnnnnnnnnnnnnnnnnnnnnnnnnnnnnnnnnnnnnnnnnnnnnnnnnnnnnnnnnnnnnnnnnnnnnnnnnnnnnnnnnnnnnnnnnnnnnnnnnnnnnnnnnnnnnnnnnnnnnnnnnnnnnnnnnnnnnnnnnnnnnnnnnnnnnnnnnnnnnnnnnnnnnnnnnnnnnnnnnnnnnnnnnnnnnnnnnnnnnnnnnnnnnnnnnnnnnnnnnnnnnnnnnnnnnnnnnnnnnnnnnnnnnnnnnnnnnnnnnnnnnnnnnnnnnnnnnnnnnnnnnnnnnnnnnnnnnnnnnnnnnnnnnnnnnnnnnnnnnnnnnnnnnnnnnnnnnnnnnnnnnnnnnnnnnnnnnnnnnnnnnnnnnnnnnnnnnnnnnnnnnnnnnnnnnnnnnnnnnnnnnnnnnnnnnnnnnnnnnnnnnnnnnnnnnnnnnnnnnnnnnnnnnnnnnnnnnnnnnnnnnnnnnnnnnnnnnnnnnnnnnnnnnnnnnnnnnnnnnnnnnnnnnnnnnnnnnnnnnnnnnnnnnnnnnnnnnnnnnnnnnnnnnnnnnnnnnnnnnnnnnnnnnnnnnnnnnnnnnnnnnnnnnnnnnnnnnnnnnnnnnnnnnnnnnnnnnnnnnnnnnnnnnnnnnnnnnnnnnnnnnnnnnnnnnnnnnnnnnnnnnnnnnnnnnnnnnnnnnnnnnnnnnnnnnnnnnnnnnnnnnnnnnnnnnnnnnnnnnnnnnnnnnnnnnnnnnnnnnnnnnnnnnnnnnnnnnnnnnnnnnnnnnnnnnnnnnnnnnnnnnnnnnnnnnnnnnnnnnnnnnnnnnnnnnnnnnnnnnnnnnnnnnnnnnnnnnnnnnnnnnnnnnnnnnnnnnnnnnnnnnnnnnnnnnnnnnnnnnnnnnnnnnnnnnnnnnnnnnnnnnnnnnnnnnnnnnnnnnnnnnnnnnnnnnnnnnnnnnnnnnnnnnnnnnnnnnnnnnnnnnnnnnnnnnnnnnnnnnnnnnnnnnnnnnnnnnnnnnnnnnnnnnnnnnnnnnnnnnnnnnnnnnnnnnnnnnnnnnnnnnnnnnnnnnnnnnnnnnnnnnnnnnnnnnnnnnnnnnnnnnnnnnnnnnnnnnnnnnnnnnnnnnnnnnnnnnnnnnnnnnnnnnnnnnnnnnnnnnnnnnnnnnnnnnnnnnnnnnnnnnnnnnnnnnnnnnnnnnnnnnnnnnnnnnnnnnnnnnnnnnnnnnnnnnnnnnnnnnnnnnnnnnnnnnnnnnnnnnnnnnnnnnnnnnnnnnnnnnnnnnnnnnnnnnnnnnnnnnnnnnnnnnnnnnnnnnnnnnnnnnnnnnnnnnnnnnnnnnnnnnnnnnnnnnnnnnnnnnnnnnnnnnnnnnnnnnnnnnnnnnnnnnnnnnnnnnnnnnnnnnnnnnnnnnnnnnnnnnnnnnnnnnnnnnnnnnnnnnnnnnnnnnnnnnnnnnnnnnnnnnnnnnnnnnnnnnnnnnnnnnnnnnnnnnnnnnnnnnnnnnnnnnnnnnnnnnnnnnnnnnnnnnnnnnnnnnnnnnnnnnnnnnnnnnnnnnnnnnnnnnnnnnnnnnnnnnnnnnnnnnnnnnnnnnnnnnnnnnnnnnnnnnnnnnnnnnnnnnnnnnnnnnnnnnnnnnnnnnnnnnnnnnnnnnnnnnnnnnnnnnnnnnnnnnnnnnnnnnnnnnnnnnnnnnnnnnnnnnnnnnnnnnnnnnnnnnnnnnnnnnnnnnnnnnnnnnnnnnnnnnnnnnnnnnnnnnnnnnnnnnnnnnnnnnnnnnnnnnnnnnnnnnnnnnnnnnnnnnnnnnnnnnnnnnnnnnnnnnnnnnnnnnnnnnnnnnnnnnnnnnnnnnnnnnnnnnnnnnnnnnnnnnnnnnnnnnnnnnnntatccagatgacaagtctagtatggtcggatacgttaacgtgattgactgtgattttgatccacacgacccggaaaatgagtgttcagagcactacgatggatcgctcaggaattgtctgacatctgtcttccagtttgctctgtcttgtgagaatctgaatactggagaacaacaatggggagactgggggatggaacgtcctgggaaagtgatttatacagatggacattcttcactcgtcgaggaggaagacgttttcctttgtccgtccgattacgatcttttctctcgttcctgctatcctagcgagccgagaaaagagacgatcacggagtctcagtatcatgagcttcagagatctatcatctaggatagtcaagtaacttgtgtttgatttgtaacatcacaaatgactggtccatcacaaacttcgtatttcaaactggatcattcgtatatttagtgcaaaaatatacatgttgtgatagaaattgtttagatacttatcggcagactaactgagttcttcaagctcgagatcagccatgtaaatctctcccacgtggctctccagagtttccagagcatggcggacctcctgagcctgggcattccacataacgctagcctccggattgtgagtccatttattgcgcatttgctcaatcgcggtgttaacaaacctgcgacccgtctctagcattttattcgttctctgtttgaaaaaccggtcccaacagtctgcaaggtcgacgtccttgcccttctgtgctttatatgcctttgctgcgcggttcaattcactgcgaatgccgtcgttgaccattttgaaccgttctaagactctcggcatgttttggtagttgtagaccgcaatagtctacagtagaattcgaaatcagttttaactctacactcttgcgacttgattcgcgaactctaatccgaaacacactagctcatatttggaataacgttcgatccatgacttccaaaaatagacattgtattttacataacgcgggtaggactctgccttgtgtatattactcgtaaattccatacaatggtatttctctgccataccgcccactccagacaggaggcatcttcacccgtctatctctctggaatctcacaatgacctcacaaaatagctccgagactcccaccatccaagctacatctcatccgcgacataatagagagccagtcactgagcaaagctaaaatggccgaagaagcagaatgcagcaagttcacaatcataaatattcgcagaaacttacaacagttcggcagcatccacgcacccccaactcgcataggtcggaaaccaaccacaacaccgctaataatagacgcgctctgcgaccacctgtcggaaaaccgggcctgtacctcgatgagatgtctgtcttcctctaggatgagtctcgcacgatgatcacaacatctagtatcagaagagcccgacagcatgtaaaagagcgcaataccgatttacgagaactatatctccataatttatcggaatttcagtcgtatcatcaagtttatatggatgaatctggatgtggtaagagggctgggtttcggcggacaggctggtcaccacttggcgtagcccctttacaggtatcgcagttacatcgcgaccagcgatatcagagtctacctacgtatacgcaggacgggatcgtcccctcgcgtgtatttcgcggtgcaactgacagcgctgtcttcgaaggctttttagctcagcttcttcagcattgcgcacgatagcctaagcctaaatctgatgtggttatggataatgcgtcattccaacactcagagcgggtctcgcagatgtgcgcggagggggggggcgtgaaactggtatatctgccactctagtcgccgggcttgaatctgatcgaggagttttttgctgagctgaaaagctttatcaaacgtaactggagtcactacaagtggatcccgatcaagggtatgatgtttttcttgcttggtgtattgacacggtcggtgcaaagcaagagagtgctagaggccactttcgacacaggcttgaggatagacgtctgcgaaacttgaacaaattaactatgactttagccagatagaagaggtgatacagtatagtatttccggacatcggtgtcaccccctacactcttccgttgttccccactaaactactttcgaagatttctcagccgcacttgttttggtgatgctacataagttaccggattatcgtattagcgagtcaaatgtttactacctataaggcgagaagctgcaacctgagtgccccacgtcaacctttccatccctcatatggctgacttggttggcactcccactgtggccccgtgaagatcaattccgacgagttaggcagaccgcttttagtaaatgctttcgacttgacgagctcctcaagcacaaacgtaaagacactgccacccatgactgggccatatttcagacctagcagcagccaggtcttgaagccgaggtgagctagaaggggtactccccggttgttcgctcgcccaacctaggcggagagcaagctgatttacattttcatgtgtattcttgagacaaggctccatggtttctttggaaaataatactgatatatcattagttgatgataattctgaagctgatgattggacaaaagatctatgacccacaagctttcgtgacatctcctattgaaacgtatcgtaatagaacaaggggcactaattcgggggctcttctcgtgattgggctcgccgtgcgttgctgccaacacctggttggccacctccccctgtccccgcaacttgatatgaacttgaaggagcgcttttttgatctacttacaaggacacttcccctccaaatctgcttgaggctagttctatatgaccacgagctactccagacgcgaacttaagtcagtttatcttggatactcattcttcttgataatgtctactctttacggaagcgattcctccaaggaaccaaatgcctacgactactgcaatgatgcaactgctttgcctttacgccatcttcaaatgagcgaaagtatctccgcgcccaacacgttctcaaactttgcacatatacacccttcgcctataccatttgagacaaacttttgccttccccagttgtcagcttatccgtgggctccttatttgacaatgccgaaatgttcgctcgagatgactgtcggtgcttacgcaaacccttctacattcagtagtcaggctgtaaatagcgcgttgtccgacacctggtctacaaataatatgttgacgagagatgctcaagatctgtccgcggagagcactgaaccccttggaagcaggtatgtctccaatttatcctttcatggcaaatcgccaactgcctcgtcctaggaatataaaaagaaacaacgaattcaagtgtggttggaagaattgtaccagctctggaggattcgcatctaaatcctctctcatgcgacatattgaatcgctgcacgtttctccacgtggcttcgcatgccctcattgcagaaaatcctttaacaggaaggatcagctccaggcacacagaagcattgtacatgttggccgggactaactggcgcgtctcaaacgcaggggtagtgcgtcataacatgagttgaagattgttcagtactgcaaatttattatgctagagagggactagcagccaaacaatgtaccgcacaagtaaaatcgaaattggctttaatattcaatgaaaatcgcagtgaataacagtagccacaacaagaaaaagcatctttgtctaccagggtcagttctctgtgtaaacaatgcagctttctttttgatgtcaaaggtgtgtgagcgaaggctgtgtgtgacaaatagcccaagcaagatatgagagaatgaaagaagatcttgccagattgttaggattcccttttgtttgatctgtttgcacgatggattctatcggttttttacaagaaattgcggtactacaacaatgactcattatgcttaccagggaatacaatacagccctacatggattaacaggggaagagctagacttagattggcgtgtctccacttaaggtccgggaattaaatcagaagagtttagagttaaaactgatttcgaattccactatagcaaatcccagtcagtcatgtagctttcattttgtgttgtgacgcaacctacatcgcgtattagagtcaatgccttgcgaggatcctcatcctggaccatccccggccactttaatggatttcctggaactggatttaagctccaaagctaaacatgatttgttttaatacttgtccatggtgagtttgcagcggaaagagatgatacttacatcacctttgatcacattgatactctgtcggagcagtcggaatacttccttattggatttgcttccaaactgttccatgacgcgatcaataggacgtttcactagcccttcttgcgacattctggggatttgttctatctacttcccctggatttgacaacacgcggccattttgagctaacgaatggttgtgggaatgcggctgagccctcggagaaactcaacccttcatacagatggtgcttcattctggcatataacatatcctttttctttcctttattggtatctcaatggttacgcgaagccctctcatttggcccttagtcaaccacgttcatgctcgcaactaacacagcggacgggcgaagacatgcgttgatacaataccggtgggagaaacgacttctttacaaacgacttatccgccccactaaatgctagccatgctcacacctgctcagtgagcgggtgagatgatttgcgggtgaaattctgggggatgctgggaaatacatgtgaccatgttccctggcagcttggtgtttcgggaagacccatttgaaaaatgcgggggctcaagttacagtagtattcgaaatcagatttacctctacactcttagactttcattcccgaatcctgatctaaaacacgctaatcaaaatacagtatagacgtcgacccccttgttccaagcatagatcttgtatcttacataacgtagtggaacggcaccgactgtattttccatgaagattgctatacgcgggctctcttctctggtttctcccaggcaaacgctttttactctaccgtaactttctgagcatcatctaaagtgagactcatcatgtggccccgaaacttcgccctcacaatggcatcttctccgcgatataattgagagccagtcactaaccacatcctaaacggccgaagaagccgaatgcaaaaaagtcatgatcatgaatgttcgtagaagcatgcggcatttcggaagcgtccgcgactttaaccccaagctcgaatagaccagaggctggctgtgcctcaatgagatggttgcctgtctttgagaatattcagaacgccgtagagtttattagcatattccacagaatctagggccatacaaactatcatcttctccagagcccttctttcaaaaagatattagaaagcagaggaaggaaagaaaattgacattttgacatctgctatacacgaaatcctatgaaagagatctgccctgacgcgtggcccaaggcaagtaaactgccatttgtcgcggaacaactaggccgataaccaggaggaagccataatatattttttcccatctagctttatccactgcttttgctcgatgaggatgtcttgattcctatgaactgaattggaaacacgcttttcacagcagaactgaatgtgaaggtcgcccaagttagtgattagatatgaaccatcctcagaaaattcaagataatcgatgtatccgttgacattaagcgtcttctctagggcacccgtcgcagggtcccagagctttacagtcttatcccaagaaccagaggctagcagtcgtccgtcgggcgagaaggccactgactccaccgattttgaatggccctcgagagtctgttccagagtatgctgcaacgcgtccgtcgctgggtcccagagccgtacagtcctatcagtagagccagaggctagtagccggccgtcgggcgagaaggccactgaatcaactagacacgaatggccattgagagtccactttcgcagccccgtcgttggatcccagagtcgtacagtcttgtcccaagagccagaggctagcagctggccgtccggtgagaagaccactgaattaactggagctaagtggccctcgagagtctgctccagcgcgcccgtatttaggtgccagagctgtatagcccaattactcgagccagaggctatgagccggctatcaggtgagaaggccactgacttgactagacctgaatcgtgtttgagagtacgttgtagcgcgccagtcgccgggtcccagagccgtacagtcctatcagtagagccagaggctagcatccggccgtcgggcgagaaggctactgagttgaccggacctgggtggcattcgagggtctgctgcagcgcacccgtttccgggtcccagagccgtatagtcttatcccaagagccagaggctagcagttggccgtcgggcgagaagaccactgagtcaatcggtcctgagtggccctcaagggtctgctgcagcgcgccagtcgccggatcccagaactgtatagtccaattactagagccagaggctagtagctggctattaggcgaaaaggctactgaatcgaccggacttgagtggccctcgagaatctgtagctctggactccaggtttcctgtacctgtggtagccgagaacaccaattgggtaggtatgtcttaaaatatcttcgaattatcgcctttctcggtgtaaacataagtccggagcagtaaagttgaaggggtgcaacctcggctatctggcggcttttctgcatgaagcgctttgcgtcatgcagaaattcggatattggggaatcaccggtgtcctatacttgttaagttaattttattgtgtgtgacaactttcataggaactcacagctgagactctttgtaatagactaatgctccccaaaacatcagatacatagcctaggatgctcattgattccacccagtgcaaaaaatgctccttcagaaataacagtgccttagatatcataaaatgtaggtccttactccgcacgaggtgatgcacccaatagcgacaggagtattgtaactctgcgctgatagagttgtggatagtctcgggactaatctccgcacatgttgtcccatcacttggtagaccacatatattctttctcagatcgtcacatataccaaggcaacgtgtagtcaacttctgttgtgtctcttcctcatctacccagaaaggagtttcgtctcgcatctctagatcaagaaggaagtcccgaaatgatagatgaaaggtgcgtaatggtaaattaatatcctctggtacactcaaaactgagtgtagcgatttcagcctgaggctaacccgcctctcagggagaccaattagtcttgaaagcgaggtaactggtagtggactttcaagcatcacgatcgcaccaatgacagtttgaaattcctcgaccagttgtttttcctgtttcttgctctgtcctttaagaagtcgatttaacacaggaagatacgtccctttgaattttgatccatcactccgatgtgtgagaatctctgccagactatcgaccggatcccattgagggtcctcaaatatgcggcacacggtagcagcaaagataaatagtggtactgataatgcaatgagagcctgtaaatctctgtctccaggccagtcaattggtagaggctgaatcttccgaatctgtccaagtctgtgattcaagaagagcgatatatcatgtgttgtcacagcctcgggaatctgatgaagagcgaggtcccggtagtcatcatttttcatctccgaaaaccctagacgaatagggagttctggtcgactggtcaagaagatccgtaagcccagagcatttgaatgctgtagatgaggtagtaattggagtatggctcgtatgtcatcgtcttgttcacattcgtccaatgcgtctatcacgattaccacggtccgtatcagatgattggattgttctaatttcctgattggtcgaagtagtagattgtcgaattgttgcttaagtgacttcatcccaatgtcgggctcgtcatagatcgcttcttgaaggccaggtattagttgagagatgttcttcgccatttgtcttgacacagtgggaaacagcttcattgcattccctctatcagcctcgcccctcctgaaaaaaaagcttgctcctagcaaattttcctgtttgaagtgtttggccactgtgcgggagacggtcgatttccctgtcccagccatcccctttaaccagaagatacattttccctgtggtgacatagcccattccgtaatgttattgagaaggtcagtcctagttcctagaaggcattcatcttcatgccggtccatataagagtcgaactcagccccatgcgcaataggtaacttgtccagagggtctgcattcgatcaataaagtcccccgagttgaattttgctataatgtacctgcgttgagactgaactgagcattgattgtgccattattgatggctgtttgcattccagaattatggtcatgaaaagatgtcgtagacgccatgattatgataacaccatagcattgttcggtattcaggaggaacatatgggcggggtagtagtaatagtggggtagcctcgacctatcgtcatgtgatgcctcattctccatttggcggatggggatttcaaactgcgcgcgagctagttaatctcacttcattttacgtgatccagcatatacattatttctattagatgtcaaattagtgtagacgaaggctgtgtgacgaagataccaagcaaggaaggcaagggcagaaggaaatcctaatgatctggaagtttgatctgcttacattcgagaacttccatcagcttccaccgatcattacgatactagaacgatgacgcattaattgttactagtggttaccatacagtcctacaggggaatgtctaaaattatactggcgtgcttcaagctagggttcgggaatgaaagcctaagagtgtagaggtaaatctgatttcgaatatcactgtactgccagctgggaaaataacagacgttataaatctaaagctcgattgcatgacccaagttatctcacatccatagcttagatacttcggtctactgaaagactctgcaagagggctgatcaacgatgtaatattgtgtcatgtttcatgaagaggacaagcacagcagttttaaggcaaaatacacgctgatcaaaatttgcagggatgaaatctgttctgagagggcgaggaatatgacacgtcttgattaacagcagatagccacatttgctgctgatatagcaagtatatttatttatcccatattcgtggccaggatgctgtcaaagtcaagaaatttgaggggcatctagattattaattgtatgagtatttccaataaatttcatagcagctcaccatttgacttgttacaatacagacacacacacacacacacacaattttgttacaatacagacgcgctcgaaatcagtttcatctctttactgtcttcaattcttttttgaactctattttgcataataccttaccatataaggttagcctgtccctgacccacatctcaggcagtatctcagtacagtaatgaatgattgcctaaaaatagcggttgtatcattgttgtattctccccaccctgtctagaaccagtcacttacaaacaaaccaaacaagccaaacagactagttaacaagagatttgcttgttgtctggctactctgcatcccccatatatccaccttggctcaactgccctctttcacaccccaccgaacactggctgagagaacttatactgagatacgaaactggtgggtagacgtttctttgcgaatccgctcactcacacgtactggcgccacaactgcactatggccacccttctatggtcacagttttgttttgatccgcacaagcgatagtggtagcccccacgctcccagctgatgtcgtggtagagttgcttggcgttggttttaatctgacgcctctcaccagattctcatttctttctagaacatatggatcccttcagcattaccgtcggtgctcttggcatcacacaattcgctatatctagcatcggtaacctgcgcgaatttatcaatggccttgacgaagcaaaggatgtgatgcaggatgtgacatctgatttggaagccatacagcttccgctctatgcgctcgagaatctccagatccctgatgataagacatatgttgcagcgaaagcagatctggagaacactggtgttgctgaagccgtgaataaatgtgggcaggcatgcgcggattttactaagaggcttgagcagtggacaaaacattccaccacaacgaaattttctctcagagatcgattgtcggtaggtttatggaacaaagaaaagatccggacctttaggacacaggtccgttcttgtcaagccatcgtccaatttgcaatcgacagcactcagttgtacgtgaaacgtctttgcgctagagaagaggcgctaattaagagcttgaagaattatcctgatccggtccgaaaatgcgtctaaaactgcacgccaagagacagagaaacaactgcgatttctcgaaaatactattcaggagcacatcaacattacaaagagaaagcaagacgaagctcttcagcgcaagaacgcgctcgaaaaccctgaggatgaagatgaggacgatgacggcggagctcagcgaactctcgccatccaagagaccaaagagcaggcacgtttgctagaaagtgaccaagctgcctctggaattgtttcccagatactcttgaaattgtccatcccggtggtcggcaatacatatgaggttactttttcaggtagtcacaatagcggcatgcagatcggccatagtacgggtactatcaactggaatggcagtcgtacctaaaggagggtcatctgtcggatatgtctacagatgatgaatcgaaacgccatccttagggaccttatcagcgtctggcgtctgtttataacttatgtcgcatgttacaatgcgctttggattctcctccatagcttcctagaccttgtgacctgcagctataatttagtctatattgctatgcagttgacgtaaactagcgattttgtcctttaatcactatcgagccgactgtttgactgacagattaaggtgatagcctacttgagacacgaatttgtcacccaaaggtgagcttcgttccaagagagcttcccataagagccgagccatctcattctctacggcttctaggaatgatgcttcgtcgtcatttgatgcgaccagcaggggctctgacatttcaagttggtgtcaagaaacagggtaatactgtctttttaccatgtaaacatgtgactttttcactatgtatttgcttactaattgtgtccgaccagattgtcaaaaccggacaattgttgtttttagttagagaattgtaccattgcgaattttacccgtacgttcgccatacaccaaatttccgtcatatattatgacatgtatagtagatcagagatagttgccctttcggcttacgggcgttaatatattgtgtgtgtaccatgaaaaattgaattctccatgctcacccttgctcacccttctgcccagtgagcgaaaagaaatgatttttgattgagggtgggggatgctggggttttgggaaatgcacgtgaccctgggtctcgtagttcccaggagctcggttgcttctacaaggacgattgaaaactgcgcgggccctcatttattgatatcatagatgctagcttacgtgcctattcttttcctttgagggctaggccactcactgccaagcgcgtatttttgaatggttaatagatccagagagcagttgtatgactcaattaatcttcctaatactgaaatgccctgtaagagacctcattaacgatgatgtaaaattgtgttctcaatatgcatagcacataaatagaggtaaatgaagattaaaagcgagagagggaactgagttccgagagggagaggaataatatacgacttgaaggacagcagattgccacagttgttgcaaatatagcaaacagagaggaggaggccgggcgatactcagcaggcaaccataggaggttgactccgttatgggttacccaggaaaagtcgctattcaatccaaagccacgtatttctgggacggactttgaaaggttggaagcggatgtgacaaatgcatcgcttcggatattgactgtaccgattgtcgtatgtagaaaattatggtcgtgtttataaaattgaacaaagccaggagagttgatcagaagtgtccattcgcactggccggtggccgaatcccagatcctgactgtcttatcatccgagactgatgcgagtcgacttccacaagcagaccatccaatagagctgacggtatcactatggccctcgagattcaatttacactgaccggtggagggatccaagatccttattgtgtcatccaaagacgccaatgcgagtcggcttccatcttgcgaccaggcaatagacctgaaccaaccactgtgcccctcgagagttgatacgcagtgacctgtggcaggatcccagatcctgactgtgttgtcaaatgatgtagatgcaactcggcttccatcttgtgaccaggcaaccgagttgacctgccggctatgaccctcgagcgtcgatgtgcaatggccggtgatcggattccagatcctgactgtcttatcccaagaagctgatgcaagttggcttccatcttgtgaccagactattgacgtaacctcgtcgctatgccgctcgagggttgatgcgctgtgactggttgctggatcccagatcttgactgttttgtcagcggaggctgatgcgagctgtcttccatcctgcgaccagctaaatgagctaaccggagcactatgcccttcgagggttgaggtgcactggccggttgctggatcccagatcctgactgttttatcaattgacgctgatgcgagtcggcttccatcttgcgaccaggcaaccaagcggaccgaatttctatgccccttaaggattgaggtgcactgaccggtgatcgggttccagaccctgactatcttatcgtttgaccatgttgcgagtcgatttcccccccgtgaccagacgatcgacataacctcgtcgctatggcccttgaggattgacgcgctgtgaccggttgctggatcccaaatcctgactgttttgtcagccgaggctgatgcgagctgtcttccatcttgcgaccagctaactgagctcactgaggcactatgaccctcgagatgtaaaatacactggccagtgaccggatcccagatcctaactatgctatcccgggacgccgatgcaagtcggcttccatcttgtgaccaggtaatccaggtcaccggaccaccatatccctcgctatgaaatttctcaacggtgaatatacacctgctggtggccagatcccatattttggctgtcttatcctcagacattgatgcgagtcggcttccatcttgcgaccaagcaatcgctatgaccgatttactatgcccttcaagggttgacgcgcactgacctgtggttggatcccagatcttgactgtcttatcatgggatgccgatgcaagtcggcctccacctggggaccacgtaatcgagttgacagaactactgtgcccttcgagtgttgacgtgcactgtccagtggttggatcccagatcctgactgtattatcagatgaggctgatgcgagtcggcttctatctttcgaccagtcaatcgagttgacctgatgacaatgcccttcgagcgtttgaaggcatggactccaatggttatcggccactggctcattcaaaacccaacttggactctcgttttgataacgtttccttgtgatactctgcagtgggctgaagataagggatgaacagtacagctgaagggggctattctgaatcaccagcctgtggtaacggatgaatcgggaagcgtcccgaacttgatgtaaaagggcctgtggctccccccttttctattttagccatttcactgttagaagtggagataccgtttacataattgaagacttacctgaagtaatccctccagcctcaacatacctactataccttgacagaggtttcctagaatgctaagggcttccagccagtgaaggtacttttgtcgtaggaaaacatccacaagccctccctcatcgaggctaggatcgccgctttcatggtagctgccgtcctgtaaatgatctatccaataaacacaagcgtattgtgcatgtgctaatggattcgtgctaggctgtccaactttatcaattgtgaatccaggaaaattgatttgcaagatatcacggcgaagtgtctggaacatgacttgaaaagaccgcaggaaaattgcctggtgtccagcttccttccctctgggaaagatctcgtcttgggcctcactgagtagatattccttcgcagactgatgaacaaaaatgatagtgtcatcgcgtaatgtcagaaatgagccacaagtcgatatgatctctgacaggatttcattatcacttaggaggtcattaggtaattcaataatggaggccagttcttgaaatgcaatagggcgatacactatcgacatactagccagaatttgcttgcagagttcggcatcttccgagttgcgaacctgatcgatcatccgaccatacaacgcattaagtccaggaggaaatgcctccagcttcttaagagcgtgcctccgcgatgttctatcgaggtcttgacagactaaggctacccaaaggaaagtgccttgcgagttgagtgacaagtaatggcatatcgtatctcgagtttcgtcgctgtattttttaactctcgccagatggtgaaccttatgttgaatgaatttgcccacggcttcagatactaacaactcattcagctctaatgagatcggagtggtctggatagtgtcaagacgctcttcgatatcggaccagttgcggctcgagacaatccactttacttgtgggtaagcagatgatatctgagcaaccaagtcgagaaggggaagtaggcccgatgtgcactcatccagcgcatcgataatcaaataggtgctctgtagggccgggtctttcagaatgtctgtaaaaatcctcgagagggcattccatgcgtttatgtcctcaaacaatgcttttcccgctttatcataccgtcgctgcacatgagagagaagaagtagctgcttctcgacaagcgaatatatcaagccacggagaacagcggtggcattattgattcgcacgtctgttgcttggcaaaagaagaacgagatattcgcagtgtccccaaataatcgtgttaattcatcgatgataccgcacagcagcattgtcttgcccttgcctggatcacctttgatccagaggaggcagttgttctgattgtctcgccattgttgaaactcatcgttgtcgagaacccagcagtatgaatctttgagcagccctccgttggtgttctgaatacggtctttgtcatgtttaggatcagtcgtccgtagatcccgcaagcacgcttgattccatgatgtttccgattgtacttgggtatcacaccgattagtcacgctcctttatagttatgcgttccactcacggaactgattagtgatatgaccaagattctgtccaacttggaacccagagtttgaaccgccatatgatgtcgtgtatgccatttttgcagccaggtgattcttagaaggggcagtcgcgagcatatggctaagtcgttgtagtaccttgtaccccgctatcaggtgatctatcaagcgacactaggaagcagagactggtagttttggttcaggctcctcaatctgtcgagacgcaatacgtataatttacttcattggggaactttagtcacttcggctaatgtttattaatccaccttgcacaagaatgactgctgtcaatattggagtggtgactcgcgaggggcgtcgagataaaggtatcaatcgtatgtttatttccaataaattactgagtagctcatcatgtaaattgaagttacaatacgtttcgatacactcagctggcctaaacctaacgcatactagcgtgtttcaggataaagtttggtaaagaacgaaagagagtaactaaagtggtgaaactgatttcgagcgcgtctgtacatttcggatccgtcctgtatgtatctatctgaacccaaaatcgaacagaggcgaattccgagacgagggatagatactgaacgaaggtggttgatattaccttcgatatatatattcagctgtggttgtgtgccgagcgggaactaaccccggaccgacgatggacccacctatggaagggcccgaaccccctcccacaaacacccaagaaacccccaccagcttctccgtggaagatttccagcccagagtaaacatcggatcccccgaatcccctaccgaaagccgtaagcgaacacgcagcggtgatgcgtttgcaccatcggaaaactcgggtcgagtgaccaccaaggaggtgtggaaactcatcggaaccctgaaagacattatccgccatcaaactgcggtcatcgaatccactcagaacgaactacgggagattaaacacaatcaacatgtcctgcaagaacagaacgagaagctccatgaggaagtgaaagcgttacgagcacaggttgaaagcgcccctgcagtcaccgcgactaggacttgggcagcagtcgcagccactggcgataatgccacaccctcgctgagccaccagaaacccgagaaagagcaaaactgcgtccgaatcagcacccagagagcctttgtagacccaagagataatgacaacaacgacggaaacgcgtttgggcgatatctccccacagataccgtcaacacccacatccgcacagcattgcagagcgacgctgcaacacaagacgcccaagtggtaggaattggcaccaccaaaaccggctatctcattcgattcaagaacgtggagtcggctcaggtggctcgcaacaacactgagtggctacataaattgggcaacaacacgaagctggttaaaccacggttcggcattgtagtgcaccgcgctccaactgacgaatttgacctggaaactggtactgcccaagcagcagtaaaaatcatccaagagaacgacctggcagaacacggtttccacatcgaagaactggcctggatgaaagcgaaggacaaggccctagggaaattcgcatcgttaggaatctggtttgactccgcagaaggagcagaacatatgctccgtagcggtttcgttgtcagtcaacactacatccctcaggtagagcgatgcgagatcaagaaaaagagatgtttccggtgtcaacggtttggacacctggcatggtcatgcaaggaaaccccgcggtgcggacactgtgcaggtcaacacgagcggcagcgctgcccaccaggaatcagggcccgctgcctcgactgtgggggtgagcacgccaccggagatcgacgatgtctaacccccgcgacctctcaccccaaccgatgttagagagcaacctacgcatccttcagttgaatatcatgaaatcaggaccaagaatggaagcactcatcaatgaccaccaaagccaagacctggatatccttctgatccaggagccatcgatcacaacctaccgcacacatgtcaaccacagcgcctggcgactatatcgacccaccacacagaccgacgcagttcggtttcgcagcctcatctacgtgaacagacggatctccacctcctcacaccgtcaagttccctgcaatcacccagatgtcgtagccatcaagatctggacgaccgactctcaaactcttttcttttctgtctacatacctccagtaccgctctttacggtcgatgacgcgtcagcaatgccggtgctcactgcaatagcaaacaccatcacagccgctgtacagaacgagcaacgctctacaagcgtcattatcacgggcgacttcaaccgacatcatccgatgtggggcggtaatcgatccaatgtggggcaacaactatatcgctcctagattcattgaagacgccagcgacctgatcgatttcttccaagcccacaacctccacagttgtctccctcgagggacggcgacttactgggcattcaacaactctagacagaactcgaccattgaccagacggtgacagataacccggacttgctcatcaaatgctatctgtatcacgaaaactatggatccgaccaccgtgccacctatccagaatggaaccttcaactccggagcaggccaaacaccaaagcaaggaaggcgtatgagcgcgcggactggactaggatcggcgaggaagtagtccgacagatgaacccatggaagcagatcaagacccggccaacactcgaccgggtagtggaaaaccttacagcggtgacggcccaggcggtcgaccggttcacacccgacacacgcccgacgccatactccaagcgatggttcacgccagatcttaagacccaacaagtcgaagtcaaccaactgcgtaggaggtggcaggcaaactgcgccgagctgggaagagagcacgctaacaccacggctgccttcgaagctatgcagcagaaacgacgagcgtggacgaggaccatcgagaaagccaagtcctcgcactggaagcagttcctagacgaagctggtgaagggaagctctggaaggccgcgacatacatgaagccccgagagacatggggttgtgtcccagcactgcgagtgggctcggacgattgcacccaaaatgaagacaaagcgagggcattcatggatgcgttcttccccgccatgaatacacccgaaatcagcccacccaccgcaacggagacggaacttcagtggcatccgattactgaattggagatcgagcgatcactgaaagcagctaaagggaatactgcacccggggaagataacttaccgatgctggtctggaagaagctttggaagtatctaaaggtctttattgtgagcatcttcacagtgtgtatagagctaggacaccacccgagacagtggaggagcgcgaaaatcatcgtcttacggaaaccaggcaagcctgattactcggcccctggtgcttaccgcccaatctcacttttgaacacacttggcaagctcctggaggcagtaatggcccgacggttatcctatgtggcggagaaacacagcctgctaccaaacagccagttcggcggacggccgggtaggaccaccgagcaagctctactagtgctgtccagtgcgatcgacaaagcctggtacaagcacaaggtggtgaccctaatcgccttcgacctcaaaggtgccttcaacggagtcaataagacaagcctggatgcgtcgctgcaggcaagacggatcccgattgtggccagaaaatggatcgcaagcttcatgagcgaccggcacgccaacattgggtttgacgacttccgcactgagactgctccgctggtgaacgctgggctagctcaaggatcaccactttcccccatcttgtttgcattcttcaacgccgacctagtcgaccagcccgtcgactcccagggaggtgcgtcggcattcattgacgactacttccgatggagaggnnnnnnnnnnnnnnnnnnnnnnnnnnnnnnnnnnnnnnnnnnnnnnnnnnnnnnnnnnnnnnnnnnnnnnnnnnnnnnnnnnnnnnnnnnnnnnnnnnnnnnnnnnnnnnnnnnnnnnnnnnnnnnnnnnnnnnnnnnnnnnnnnnnnnnnnnnnnnnnnnnnnnnnnnnnnnnnnnnnnnnnnnnnnnnnnnnnnnnnnnnnnnnnnnnnnnnnnnnnnnnnnnnnnnnnnnnnnnnnnnnnnnnnnnnnnnnnnnnnnnnnnnnnnnnnnnnnnnnnnnnnnnnnnnnnnnnnnnnnnnnnnnnnnnnnnnnnnnnnnnnnnnnnnnnnnnnnnnnnnnnnnnnnnnnnnnnnnnnnnnnnnnnnnnnnnnnnnnnnnnnnnnnnnnnnnnnnnnnnnnnnnnnnnnnnnnnnnnnnnnnnnnnnnnnnnnnnnnnnnnnnnnnnnnnnnnnnnnnnnnnnnnnnnnnnnnnnnnnnnnnnnnnnnnnnnnnnnnnnnnnnnnnnnnnnnnnnnnnnnnnnnnnnnnnnnnnnnnnnnnnnnnnnnnnnnnnnnnnnnnnnnnnnnnnnnnnnnnnnnnnnnnnnnnnnnnnnnnnnnnnnnnnnnnnnnnnnnnnnnnnnnnnnnnnnnnnnnnnnnnnnnnnnnnnnnnnnnnnnnnnnnnnnnnnnnnnnnnnnnnnnnnnnnnnnnnnnnnnnnnnnnnnnnnnnnnnnnnnnnnnnnnnnnnnnnnnnnnnnnnnnnnnnnnnnnnnnnnnnnnnnnnnnnnnnggcagatacgacagctctaccaggcatgtatcgcacctatagtagactacgcatcgacggtctagcatgacccgcttagagacaaagttcacatccgacacttgaacacagttcagagaaacgtgctgatcagaatcctgtcggcgttcaggacggtagcaaccgcgaccctagaggttgaagcctatatactccccacgcaccttcgccttcgccaccgagcgcagcgcacgattgcgagactgcacactctacctcgcgaccatcccatttggagtgctctgtcaagagcccagaaccgtaggaacaatgtcggatcatacgcccgcttcccattagcagaagcgctgaagaccatggacgttgacaggctcaacgaactggagatgattgacccacgcccgctaccaccgtggcgaaaggacgccttcacagagattgagcttgaacccgaccgagagacagcgagagatagggcggtgtccgcaaaggacacgtcaaacatcgtcgtctactcagacgcctccgggcgtgagggccatctaggagccgctatcgtggccctgaacgacaatgatgaggtgacggaatcccaacaggtgcaagtggggtcgatggaacggtggtcggttcatgtagcggaactcataggcatcttctacgcggtcagcacggtattcaagttggctcaccaacgcacgagcgtcggaaatcatatacacgtaacagcaacaatcctttgtgatagcagatccgctttgcaagcaatccagaatgtgaagaatagatcggggcaacgaataacccacgcaatcctccaagcagccaccgaggttcaagcagggcatattgccctccgtcttcagtggatgccgggacattgtggaaacgtcgggaacgagaccgcggatcgactcgccaaagaagccgcacaaccgggcaaaacccatcctttccggccgctgctgacgagagagaacgcctttctccgcagcaagacccatgctcagtgggagcaggagtggaagtcaagcaccaaaggtgcgcacctacggaaggtggacggcgcgctaccagcgaggtacaccaggaaaatgtacggaagcttgcccaggaaccgagcatacctgctcactcagctgcgcacgggccacaactggttatccacttacgccaagaaatttggcttccgggacgatgatcgatgcgagtgcggcgcgcaggagacggtcagccacgtgttgctggaatgtccaaaactacgagacttgcggatagaattaagaagaaatgttggggacgcgttgaacagcgtgtcgagtctgctgggaggctcaaacgaaggtgtgagaggtaagccagacaccgtctcgagggcgaagacggttcaggccgtattggacttcgccgaggcgtcacagaggtttcgcagtcgtgcgccacaagggcagcctaacagcgggagcggcaataggccagggcaggccgtgacgaggctctaagattcagtcagaaagtggatcactctacatgtacatactcggatatatagtcgttgtatactgcatatcgctttgcgaggggtcagtgtaaatgaattctactactactactactactactacgtctgtacatttcaatgacttgaaatttgctaaatcaaaaacagactagcgtgtttcaggatttattttgggaaagaatcgaagagaataaagtggtgaaactgatttcgagcgcgtctgtacttactccttcggaccttgcaaattgctgaaagcccgataaattctcatttggggatgagtccttgggatctgtcaatatcgaacaatttggctcagatggtccacacccccattgctgcatgaagccttcctcctgggacatgttgtaattcccttattaacgcaggccaaacaataaagaggcaaggaaaacgagtgtggggaggggaggctagtgtacaaaaatgatgggacgcctaggtgcgcagcacctgagcagggaaagccaaagctttgggggggggggaacgtcggggacaaaggagacggaagatgggactggggggagcgaccaatttaaggccaaggtgggggcaaggcgcgcgcctggaggaagggagggggaaatgctaaatcgaaggttctagtctccaagcagcgaccgcaagtggcttgtggtcgcagagtcaggcggttttgaatcgcgaagttggacatccaataggctttccccacgcacctccactaccgcaacaagtcgacttcatacataaacttcgaggaagataaaataatttctctggacgcttcagcaccatttgtggcacggccactctcacactggaagtctctggtcgtaaagaaaggcctctcgagaaaggagaaaacggttctacgtcagtgtggagacgatttggacgatctcagatccacaagacccataactcctttttagctatttttagcttggtcaaggtacccataaagccagaccaaaggccttcagcttgaaagagtatatctgcctaaagtagcatacccaaagtgtgccacaagcaaaaaagtatgcctatatcattcacttactatatttaggcgcatcccaagcaggcgcgcttcttctgatagagcccgtcctgggacagaccacggttttccctcctcgaagctatcccaagtagggttgcttcttctgatagagtccgtcctgggacagaccacggttcttcccctccttctacactatcccaaatagggttgcttcttctgatagagtccgtcctgggacgggccacggttttccctccttctacactatcgcatgcagatggaccccaggaagcaccaaactctccgcattacagtaaagcaactgcgaaatgcagaagggagaagttgacactttgccagttaggatgttgctttgtttgtgctgtttgttgcgtttgcgtggaatcttcttggtagtctagccttctaattataggctcttatatctgtcttacaatctacagtcatgttgcatgagtatttgcacccaagtacttcggaagccccacttttcttctgccggttaaaccctctcattgaaaaatatatagctaactagctagtaacaagtatgccaaccttcacatatacgctcacgaacgtatggtggaagctctggactggggaaaaaaagggtagtaacctttataatactatagtataatacgcgcatgtcggatagggtttatactagtagtaataagcaggcggtaaaaaagggcggtcaaagatggaggtactggggtgcgaatactcatgcaacgccactgtataaaaaggaattgggattattacgagtatgtacaaaacgggtatatttactgcatcatgtgctttcctcaaaacataatcaatagtcgcggcaactctatgctcaggctctagattgccgcagccttcaatttcaaacatcctaagaagtttctccacatttttctcggcgatctgtcgggttcccgtgaggttatccgtttcaaatctgagatactgtaactttataattgcgcatccctcataatattttagtcgatggagggcgaggctgtttgttcggtggccaagaaggttttcgcttgcttccattctcttaatatgttttgttttgctttaaaggaaagaggacaatagtctatccgaaagaatagaaaggacggccataataatttaaatgtacctacgacactgaaacccgtgtcgcgcttttgccgcacccccgagccctccggtatggcccggctctccagtgtctctagtgcgtccctactctctagtacgtccctactctctagtgtgtccctactctccagtgcgtcccgactctctagtacgtccctactctctaagccccccgcaggagtataggttccggcaggagtataggttcccgcaggagtgtaggttcccgcaggagtgtatgttcccgcaggattaagcctcccgcaggagtgtaggttcccgcaggagtatgttcccgcaggattaagcctcccgcaggagtataggttcccgcaggattaagcctcccgcaggattgagcctcctgcaggattgagcctcccgcaggagtataggttcccgcgggagtgtaggttcccgcaggattgagcctcccgtagaagtgtattgattacctgttcaagatcccacgagtagggccctcgcgttccttggaccatattcgaccgtatgacccatggcatggtccctaggcacactactgattgctcccagagtaggaatcataattcccggaagatatacagctcctaggattgaaatgtatagctccggggaacgaaaggtggtaccctaggagcttcgctcttactttctccgcctgagagacggacttataccgtcattcctccgactaagcggacgaaaagggggaccagatctttgtaatttactgggaagggatcctaggcgcctataagacacccctcttaggacatgcgtagacctatatggcttgaaataagagcgtactactgataagacgtatggcaccccgcgagaaatctaataggagtggtactgggatgagagactgcttttgtcactatgatagagctatgtagagtatcctagaggtggtaatacgaaaggaaattgataacagataaagactatttttagctagcttatttcaaaagtgagggtcacttagaaggctgaggataagagacctctcaaaataggtacctactcgtgatagaatcctcttgagaggaaattcgtcacagtatgtcccacagaagagccccagcaacatagaagggaaaacgttatatgagctggctcttggtactactcctctcctagtccacttattctaggtttaatccagtctcgggatagtctagaggcgaccagggaatacgcacgacggttctcagccagatacccatgctgtcctagtgagggctggtgtcattggcttatcagctgaaaggtgggtccccgcagtggcctttgatgcggcgatcgaggatggcactaacacgatatttatgacattcggcgacgatctggctgtgagtgaaaaggcggcggattcgatcacacgtgcactcaaagccgatagtgatcataatcggccgacaagaccccggcagaagatgataaataatgcacttgagatctaggtcaaaatacctgtgacccatatagaccgtagtcagaagaccgaggacccttatggccactaagccagggtggccgccagttgccagctctaaagcctatctagactaggggctgtggacgtatgtccaatgtggacctgcgtccacggctgtcggtaattggccttgagtcaactgttctggatcacggggcctagaaccaaggccttgcggtcgcagctccctaaccacggacgcacatctccaggcctgggactaggggggacgccagttggcagccagagggctcgccaggatcatgggccatggtcgtacgaccagataggacttagacctatgaaccctaggaacaagatgtggggctcccgggaatgccgatcgagttccccggaaccaaccacagcccaggaacgccagacgcgctcctaggcatggatcaagtgatcccagaaacacctcgtgtcctcgaggaactctaagtctgatccctaggagcgaccaagagcgtgcctaggaaccatactatagatcctaggaatgagagtcctggtaagggggtctagaatacatagctataaccaattttagaaatacaaattttagaacgcgggcaataagagcggcaacagaaagaaggcctaatcattgaatattattagccaagcggcactctacctcaaatctcagcccccttccgtactgtagggggaactactggcttggatttgatgcctgtggaatctgacataaaagttggcatgccatggaggattttttctaggttggtaggatgaaataattcttacaccagactttgggggggggggggggggccgggggattaggnnnnnnnnnnnnnnnnnnnnnnnnnnnnnnnnnnnnnnnnnnnnnnnnnnnnnnnnnnnnnnnnnnnnnnnnnnnnnnnnnnnnnnnnnnnnnnnnnnnnnnnnnnnnnnnnnnnnnnnnnnnnnnnnnnnnnnnnnnnnnnnnnnnnnnnnnnnnnnnnnnnnnnnnnnnnnnnnnnnnnnnnnnnnnnnnnnnnnnnnnnnnnnnnnnnnnnnnnnnnnnnnnnnnnnnnnnnnnnnnnnnnnnnnnnnnnnnnnnnnnnnnnnnnnnnnnnnnnnnnnnnnnnnnnnnnnnnnnnnnnnnnnnnnnnnnnnnnnnnnnnnnnnnnnnnnnnnnnnnnnnnnnnnnnnnnnnnnnnnnnnnnnnnnnnnnnnnnnnnnnnnnnnnnnnnnnnnnnnnnnnnnnnnnnnnnnnnnnnnnnnnnnnnnnnnnnnnnnnnnnnnnnnnnnnnnnnnnnnnnnnnnnnnnnnnnnnnnnnnnnnnnnnnnnnnnnnnnnnnnnnnnnnnnnnnnnnnnnnnnnnnnnnnnnnnnnnnnnnnnnnnnnnnnnnnnnnnnnnnnnnnnnnnnnnnnnnnnnnnnnnnnnnnnnnnnnnnnnnnnnnnnnnnnnnnnnnnnnnnnnnnnnnnnnnnnnnnnnnnnnnnnnnnnnnnnnnnnnnnnnnnnnnnnnnnnnnnnnnnnnnnnnnnnnnnnnnnnnnnnnnnnnnnnnnnnnnnnnnnnnnnnnnnnnnnnnnnnnnnnnnnnnnnnnnnnnnnnnnnnnnnnnnnnnnnnnnnnnnnnnnnnnnnnnnnnnnnnnnnnnnnnnnnnnnnnnnnnnnnnnnnnnnnnnnnnnnnnnnnnnnnnnnnnnnnnnnnnnnnnnnnnnnnnnnnnnnnnnnnnnnnnnnnnnnnnnnnnnnnnnnnnnnnnnnnnnnnnnnnnnnnnnnnnnnnnnnnnnnnnnnnnnnnnnnnnnnnnnnnnnnnnnnnnnnnnnnnnnnnnnnnnnnnnnnnnnnnnnnnnnnnnnnnnnnnnnnnnnnnnnnnnnnnnnnnnnnnnnnnnnnnnnnnnnnnnnnnnnnnnnnnnnnnnnnnnnnnnnnnnnnnnnnnnnnnnnnnnnnnnnnnnnnnnnnnnnnnnnnnnnnnnnnnnnnnnnnnnnnnnnnnnnnnnnnnnnnnnnnnnnnnnnnnnnnnnnnnnnnnnnnnnnnnnnnnnnnnnnnnnnnnnnnnnnnnnnnnnnnnnnnnnnnnnnnnnnnnnnnnnnnnnnnnnnnnnnnnnnnnnnnnnnnnnnnnnnnnnnnnnnnnnnnnnnnnnnnnnnnnnnnnnnnnnnnnnnnnnnnnnnnnnnnnnnnnnnnnnnnnnnnnnnnnnnnnnnnnnnnnnnnnnnnnnnnnnnnnnnnnnnnnnnnnnnnnnnnnnnnnnnnnnnnnnnnnnnnnnnnnnnnnnnnnnnnnnnnnnnnnnnnnnnnnnnnnnnnnnnnnnnnnnnnnnnnnnnnnnnnnnnnnnnnnnnnnnnnnnnnnnnnnnnnnnnnnnnnnnnnnnnnnnnnnnnnnnnnnnnnnnnnnnnnnnnnnnnnnnnnnnnnnnnnnnnnnnnnnnnnnnnnnnnnnnnnnnnnnnnnnnnnnnnnnnnnnnnnnnnnnnnnnnnnnnnnnnnnnnnnnnnnnnnnnnnnnnnnnnnnnnnnnnnnnnnnnnnnnnnnnnnnnnnnnnnnnnnnnnnnnnnnnnnnnnnnnnnnnnnnnnnnnnnnnnnnnnnnnnnnnnnnnnnnnnnnnnnnnnnnnnnnnnnnnnnnnnnnnnnnnnnnnnnnnnnnnnnnnnnnnnnnnnnnnnnnnnnnnnnnnnnnnnnnnnnnnnnnnnnnnnnnnnnnnnnnnnnnnnnnnnnnnnnnnnnnnnnnnnnnnnnnnnnnnnnnnnnnnnnnnnnnnnnnnnnnnnnnnnnnnnnnnnnnnnnnnnnnnnnnnnnnnnnnnnnnnnnnnnnnnnnnnnnnnnnnnnnnnnnnnnnnnnnnnnnnnnnnnnnnnnnnnnnnnnnnnnnnnnnnnnnnnnnnnnnnnnnnnnnnnnnnnnnnnnnnnnnnnnnnnnnnnnnnnnnnnnnnnnnnnnnnnnnnnnnnnnnnnnnnnnnnnnnnnnnnnnnnnnnnnnnnnnnnnnnnnnnnnnnnnnnnnnnnnnnnnnnnnnnnnnnnnnnnnnnnnnnnnnnnnnnnnnnnnnnnnnnnnnnnnnnnnnnnnnnnnnnnnnnnnnnnnnnnnnnnnnnnnnnnnnnnnnnnnnnnnnnnnnnnnnnnnnnnnnnnnnnnnnnnnnnnnnnnnnnnnnnnnnnnnnnnnnnnnnnnnnnnnnnnnnnnnnnnnnnnnnnnnnnnnnnnnnnnnnnnnnnnnnnnnnnnnnnnnnnnnnnnnnnnnnnnnnnnnnnnnnnnnnnnnnnnnnnnnnnnnnnnnnnnnnnnnnnnnnnnnnnnnnnnnnnnnnnnnnnnnnnnnnnnnnnnnnnnnnnnnnnnnnnnnnnnnnnnnnnnnnnnnnnnnnnnnnnnnnnnnnnnnnnnnnnnnnnnnnnnnnnnnnnnnnnnnnnnnnnnnnnnnnnnnnnnnnnnnnnnnnnnnnnnnnnnnnnnnnnnnnnnnnnnnnnnnnnnnnnnnnnnnnnnnnnnnnnnnnnnnnnnnnnnnnnnnnnnnnnnnnnnnnnnnnnnnnnnnnnnnnnnnnnnnnnnnnnnnnnnnnnnnnnnnnnnnnnnnnnnnnnnnnnnnnnnnnnnnnnnnnnnnnnnnnnnnnnnnnnnnnnnnnnnnnnnnnnnnnnnnnnnnnnnnnnnnnnnnnnnnnnnnnnnnnnnnnnnnnnnnnnnnnnnnnnnnnnnnnnnnnnnnnnnnnnnnnnnnnnnnnnnnnnnnnnnnnnnnnnnnnnnnnnnnnnnnnnnnnnnnnnnnnnnnnnnnnnnnnnnnnnnnnnnnnnnnnnnnnnnnnnnnnnnnnnnnnnnnnnnnnnnnnnnnnnnnnnnnnnnnnnnnnnnnnnnnnnnnnnnnnnnnnnnnnnnnnnnnnnnnnnnnnnnnnnnnnnnnnnnnnnnnnnnnnnnnnnnnnnnnnnnnnnnnnnnnnnnnnnnnnnnnnnnnnnnnnnnnnnnnnnnnnnnnnnnnnnnnnnnnnnnnnnnnnnnnnnnnnnnnnnnnnnnnnnnnnnnnnnnnnnnnnnnnnnnnnnnnnnnnnnnnnnnnnnnnnnnnnnnnnnnnnnnnnnnnnnnnnnnnnnnnnnnnnnnnnnnnnnnnnnnnnnnnnnnnnnnnnnnnnnnnnnnnnnnnnnnnnnnnnnnnnnnnnnnnnnnnnnnnnnnnnnnnnnnnnnnnnnnnnnnnnnnnnnnnnnnnnnnnnnnnnnnnnnnnnnnnnnnnnnnnnnnnnnnnnnnnnnnnnnnnnnnnnnnnnnnnnnnnnnnnnnnnnnnnnnnnnnnnnnnnnnnnnnnnnnnnnnnnnnnnnnnnnnnnnnnnnnnnnnnnnnnnnnnnnnnnnnnnnnnnnnnnnnnnnnnnnnnnnnnnnnnnnnnnnnnnnnnnnnnnnnnnnnnnnnnnnnnnnnnnnnnnnnnnnnnnnnnnnnnnnnnnnnnnnnnnnnnnnnnnnnnnnnnnnnnnnnnnnnnnnnnnnnnnnnnnnnnnnnnnnnnnnnnnnnnnnnnnnnnnnnnnnnnnnnnnnnnnnnnnnnnnnnnnnnnnnnnnnnnnnnnnnnnnnnnnnnnnnnnnnnnnnnnnnnnnnnnnnnnnnnnnnnnnnnnnnnnnnnnnnnnnnnnnnnnnnnnnnnnnnnnnnnnnnnnnnnnnnnnnnnnnnnnnnnnnnnnnnnnnnnnnnnnnnnnnnnnnnnnnnnnnnnnnnnnnnnnnnnnnnnnnnnnnnnnnnnnnnnnnnnnnnnnnnnnnnnnnnnnnnnnnnnnnnnnnnnnnnnnnnnnnnnnnnnnnnnnnnnnnnnnnnnnnnnnnnnnnnnnnnnnnnnnnnnnnnnnnnnnnnnnnnnnnnnnnnnnnnnnnnnnnnnnnnnnnnnnnnnnnnnnnnnnnnnnnnnnnnnnnnnnnnnnnnnnnnnnnnnnnnnnnnnnnnnnnnnnnnnnnnnnnnnnnnnnnnnnnnnnnnnnnnnnnnnnnnnnnnnnnnnnnnnnnnnnnnnnnnnnnnnnnnnnnnnnnnnnnnnnnnnnnnnnnnnnnnnnnnnnnnnnnnnnnnnnnnnnnnnnnnnnnnnnnnnnnnnnnnnnnnnnnnnnnnnnnnnnnnnnnnnnnnnnnnnnnnnnnnnnnnnnnnnnnnnnnnnnnnnnnnnnnnnnnnnnnnnnnnnnnnnnnnnnnnnnnnnnnnnnnnnnnnnnnnnnnnnnnnnnnnnnnnnnnnnnnnnnnnnnnnnnnnnnnnnnnnnnnnnnnnnnnnnnnnnnnnnnnnnnnnnnnnnnnnnnnnnnnnnnnnnnnnnnnnnnnnnnnnnnnnnnnnnnnnnnnnnnnnnnnnnnnnnnnnnnnnnnnnnnnnnnnnnnnnnnnnnnnnnnnnnnnnnnnnnnnnnnnnnnnnnnnnnnnnnnnnnnnnnnnnnnnnnnnnnnnnnnnnnnnnnnnnnnnnnnnnnnnnnnnnnnnnnnnnnnnnnnnnnnnnnnnnnnnnnnnnnnnnnnnnnataggtagtttgccgtgtaggggggggggggggggggggggggggtgcctgggtattaggaaattcgcctgatagagtggagtatgttccctagccaatcatacataataaacaccttatttctttcaccactttcattgaaaagataaatgaattaattggatttttattctttttgtagtcagatttctgtgacaatcaattgttttgcaaattttctcttgcccgttggttgaccttttaacttttagcagggtatcaatgattcggtcaactcctaaccgttatattttatcgtgtatcaacatgatgcccgacggttcaaggatttgctagtgctgaaagtttgctgtagtgacgttgcagacacgtaaaaggtatggcgggcaataagtcaataacgttaaaagtacggtcgtttcacgttgccgcacctatttgatgaccgcaaataacaccagtaattgttgcccttccatttatgcggggtctgccttcataagttcaacacacaaaggaccgattttcgtgtagtactttgaatatcgtggtcttttcgcgttccatgattgaagactccccttcatgtaataacatttatatttattgggcccctttccattagcggatctaagttttataagagtccctgctatctatattttctatataggcttctctactcctaaagtacctccagatatcaaggcaacgcgctcaatggccgctatcaaggctaccaggtcaaaggatgtcgtttcaaaaagaaagttgatgcggcaaaaacaatgccgtcgcaaaacaagtctgatgaaaaaggcatgcgaatatagcaggatgtgcggcgcagacgtatgcgtgggaattcgtatccgagagacgggccaggtacatattttatcagcggatacttcgggattttgggctttccttagctcgcaattagtatgtctcaaactatggctctgatgaaaaggtgactgacctatcaagaactcctactatccagcgccaatgctagtgacacaccaggatctaccgcaggttgataaagatacaccgcaacaacctatatgaagtcataagaccgaagcggaaccttcatcagaaagaacctttgtttttcccatcctcggtcagggattttatgcaaccactatcccaatagtttaatttactttactgagaatatagctgtgattggcggtccaatgatgaattctatatgaggtaattttccatgtgcagttccccatacggaagagggctctgtatggaagaaggctccgtatggaagaagactacacatggagactcactgattaccaacccaaacagggatggcaaatgcgagatatcattggctagcttgactactccttgaagcgccagactactcggtcttcctactccaaggtggagaaaggagtcctagagaacccttcttagacctccttatctccggctaacgccgaacgactttaatattattgcctccataattttcacctagattaattttagcctcatgaataattatgccagacctaatattatatctttgtaaatttaaagcactccaatatcattgccaccataattttagccttataaataattataacggggctaatattgtgtcatagtaaatttaaaactcgccaatttttaatatagctaagattaaagtaaatacatgcattcttgtaaagtaaattagaaatatgggacaaagataagaagtaattccatgaatttgtcactggctggtcttctttgcttgtattcatttgtctggaacggaacgcacctaagattccttgaaaaagcaaagggagccccaacagcagaccactagttagtagcagattcgagaaagcctcttttggcatttccaggtgacagatgcaaatggtattgctcttgtcgagcagctgcgcggacgataggatgaaatggcatgatgtgcttggtggctttgacggagacgcgccatgaaacgcgcggctctgtcgcagtatcgtcatgaaatatggcccaacgaaggcacacattggcgtaaccaccaggttcagatacctgcatttgattcagcgccccagtcacctgagaatagtctagccacagactctcggcgggacctgagataccgtgggtgacgttaaaatcctccgagaaacggatagtgccggcaaatatacccaggaagtctccctcgcagataggcacaatagaagagacgaatagagaatcgtcgtctttaggcagaagagtgatgaatgcggacttgtctgtcccaccttcgtataccgattcatcgttgtgtggtatgcctagaatatcagtcgagatagacactgagccgcattgcctgaagctttcttcttcggtgttgacggcccactcgttcgaagcattatcccaagagagctctggcactttcaaccgttctagcacctgaggattggtgaggtagctaagacgcttcgagtctcctgtcttcaatttggtaatccgcgtttccagttgttcgaaatgagggagatactcgttttcccatctcaaaactttatccacaagcggagtttccgatgttttggaataacctctgcagaaactgtcgaattctttcgtacggtagaagagaattttctcaataccagcctcacgcatgtggaatatgttcttccagaaaatgcggtattgtcgctggttttctgcacccaagctatacccggtgtcttccatgaatttctttgtggcagctttttccgccatggtgaatccatcagccgggcccttgacgggtggcagcgtggcagggtcgatcagcgccgcgcacttgagaatgattggccagaagatagtttcgttgtatcttgtctgtattgccctgccagtagttaaagcagtgtctcttcgaatagcgtgaattgcctgctcataactgtatccagagaactcttgggcgtgctcccgcatcctctcgagcttagttgttgccagggccatgcagtcgcgctgtccatattgtgcgatatcagagttgtatttgacacattgtatcaatattgttgttatgaccttcatctcgaaggctgagtttaggtgtaacggcaaagagctgtcaaggggatctggcacagattcggggtcgtcgacttcggactaaacatgacccatgtatctattagactttcttcaatctagatgaacaaaataacataccgttgtttgtacttctggcgaaattgattcctcgggtgccttatctttggctgtcccatttccatcagctactgacgaaccgggcggttgatctatcaactccgaccggtggcttctttttctcctctttttcttcttcttctccgtgctggccatatcgctataggttgtaggaccctccttccctgtccgtttcataagtcgataggacccacgagtgtcatgtggtggagtcggaggggtttctatggtcgcttccttagcctgagaaataggctcggtcgcgcccctagcaatcacgagtcgagctttgtaaactaaagcgaccgttaatgatccattctctcagacgttggcgggggctaactcaccatgatcggcagcgtgggcgataaccagattaaggtgctcctcactgtcctcaattccgcaaattgtgaatacctctcgtatcttctgggctgtcaggcccacaatgnnnnnnnnnnnnnnnnnnnnnnnnnnnnnnnnnnnnnnnnnnnnnnnnnnnnnnnnnnnnnnnnnnnnnnnnnnnnnnnnnnnnnnnnnnnnnnnnnnnnnnnnnnnnnnnnnnnnnnnnnnnnnnnnnnnnnnnnnnnnnnnnnnnnnnnnnnnnnnnnnnnnnnnnnnnnnnnnnnnnnnnnnnnnnnnnnnnnnnnnnnnnnnnnnnnnnnnnnnnnnnnnnnnnnnnnnnnnnnnnnnnnnnnnnnnnnnnnnnnnnnnnnnnnnnnnnnnnnnnnnnnnnnnnnnnnnnnnnnnnnnnnnnnnnnnnnnnnnnnnnnnnnnnnnnnnnnnnnnnnnnnnnnnnnnnnnnnnnnnnnnnnnnnnnnnnnnnnnnnnnnnnnnnnnnnnnnnnnnnnnnnnnnnnnnnnnnnnnnnnnnnnnnnnnnnnnnnnnnnnnnnnnnnnnnnnnnnnnnnnnnnnnnnnnnnnnnnnnnnnnnnnnnnnnnnnnnnnnnnnnnnnnnnnnnnnnnnnnnnnnnnnnnnnnnnnnnnnnnnnnnnnnnnnnnnnnnnnnnnnnnnnnnnnnnnnnnnnnnnnnnnnnnnnnnnnnnnnnnnnnnnnnnnnnnnnnnnnnnnnnnnnnnnnnnnnnnnnnnnnnnnnnnnnnnnnnnnnnnnnnnnnnnnnnnnnnnnnnnnnnnnnnnnnnnnnnnnnnnnnnnnnnnnnnnnnnnnnnnnnnnnnnnnnnnnnnnnnnnnnnnnnnnnnnnnnnnnnnnnnnnnnnnnnnnnnnnnnnnnnnnnnnnnnnnnnnnnnnnnnnnnnnnnnnnnnnnnnnnnnnnnnnnnnnnnnnnnnnnnnnnnnnnnnnnnnnnnnnnnnnnnnnnnnnnnnnnnnnnnnnnnnnnnnnnnnnnnnnnnnnnnnnnnnnnnnnnnnnnnnnnnnnnnnnnnnnnnnnnnnnnnnnnnnnnnnnnnnnnnnnnnnnnnnnnnnnnnnnnnnnnnnnnnnnnnnnnnnnnnnnnnnnnnnnnnnnnnnnnnnnnnnnnnnnnnnnnnnnnnnnnnnnnnnnnnnnnnnnnnnnnnnnnnnnnnnnnnnnnnnnnnnnnnnnnnnnnnnnnnnnnnnnnnnnnnnnnnnnnnnnnnnnnnnnnnnnnnnnnnnnnnnnnnnnnnnnnnnnnnnnnnnnnnnnnnnnnnnnnnnnnnnnnnnnnnnnnnnnnnnnnnnnnnnnnnnnnnnnnnnnnnnnnnnnnnnnnnnnnnnnnnnnnnnnnnnnnnnnnnnnnnnnnnnnnnnnnnnnnnnnnnnnnnnnnnnnnnnnnnnnnnnnnnnnnnnnnnnnnnnnnnnnnnnnnnnnnnnnnnnnnnnnnnnnnnnnnnnnnnnnnnnnnnnnnnnnnnnnnnnnnnnnnnnnnnnnnnnnnnnnnnnnnnnnnnnnnnnnnnnnnnnnnnnnnnnnnnnnnnnnnnnnnnnnnnnnnnnnnnnnnnnnnnnnnnnnnnnnnnnnnnnnnnnnnnnnnnnnnnnnnnnnnnnnnnnnnnnnnnnnnnnnnnnnnnnnnnnnnnnnnnnnnnnnnnnnnnnnnnnnnnnnnnnnnnnnnnnnnnnnnnnnnnnnnnnnnnnnnnnnnnnnnnnnnnnnnnnnnnnnnnnnnnnnnnnnnnnnnnnnnnnnnnnnnnnnnnnnnnnnnnnnnnnnnnnnnnnnnnnnnnnnnnnnnnnnnnnnnnnnnnnnnnnnnnnnnnnnnnnnnnnnnnnnnnnnnnnnnnnnnnnnnnnnnnnnnnnnnnnnnnnnnnnnnnnnnnnnnnnnnnnnnnnnnnnnnnnnnnnnnnnnnnnnnnnnnnnnnnnnnnnnnnnnnnnnnnnnnnnnnnnnnnnnnnnnnnnnnnnnnnnnnnnnnnnnnnnnnnnnnnnnnnnnnnnnnnnnnnnnnnnnnnnnnnnnnnnnnnnnnnnnnnnnnnnnnnnnnnnnnnnnnnnnnnnnnnnnnnnnnnnnnnnnnnnnnnnnnnnnnnnnnnnnnnnnnnnnnnnnnnnnnnnnnnnnnnnnnnnnnnnnnnnnnnnnnnnnnnnnnnnnnnnnnnnnnnnnnnnnnnnnnnnnnnnnnnnnnnnnnnnnnnnnnnnnnnnnnnnnnnnnnnnnnnnnnnnnnnnnnnnnnnnnnnnnnnnnnnnnnnnnnnnnnnnnnnnnnnnnnnnnnnnnnnnnnnnnnnnnnnnnnnnnnnnnnnnnnnnnnnnnnnnnnnnnnnnnnnnnnnnnnnnnnnnnnnnnnnnnnnnnnnnnnnnnnnnnnnnnnnnnnnnnnnnnnnnnnnnnnnnnnnnnnnnnnnnnnnnnnnnnnnnnnnnnnnnnnnnnnnnnnnnnnnnnnnnnnnnnnnnnnnnnnnnnnnnnnnnnnnnnnnnnnnnnnnnnnnnnnnnnnnnnnnnnnnnnnnnnnnnnnnnnnnnnnnnnnnnnnnnnnnnnnnnnnnnnnnnnnnnnnnnnnnnnnnnnnnnnnnnnnnnnnnnnnnnnnnnnnnnnnnnnnnnnnnnnnnnnnnnnnnnnnnnnnnnnnnnnnnnnnnnnnnnnnnnnnnnnnnnnnnnnnnnnnnnnnnnnnnnnnnnnnnnnnnnnnnnnnnnnnnnnnnnnnnnnnnnnnnnnnnnnnnnnnnnnnnnnnnnnnnnnnnnnnnnnnnnnnnnnnnnnnnnnnnnnnnnnnnnnnnnnnnnnnnnnnnnnnnnnnnnnnnnnnnnnnnnnnnnnnnnnnnnnnnnnnnnnnnnnnnnnnnnnnnnnnnnnnnnnnnnnnnnnnnnnnnnnnnnnnnnnnnnnnnnnnnnnnnnnnnnnnnnnnnnnnnnnnnnnnnnnnnnnnnnnnnnnnnnnnnnnnnnnnnnnnnnnnnnnnnnnnnnnnnnnnnnnnnnnnnnnnnnnnnnnnnnnnnnnnnnnnnnnnnnnnnnnnnnnnnnnnnnnnnnnnnnnnnnnnnnnnnnnnnnnnnnnnnnnnnnnnnnnnnnnnnnnnnnnnnnnnnnnnnnnnnnnnnnnnnnnnnnnnnnnnnnnnnnnnnnnnnnnnnnnnnnnnnnnnnnnnnnnnnnnnnnnnnnnnnnnnnnnnnnnnnnnnnnnnnnnnnnnnnnnnnnnnnnnnnnnnnnnnnnnnnnnnnnnnnnnnnnnnnnnnnnnnnnnnnnnnnnnnnnnnnnnnnnnnnnnnnnnnnnnnnnnnnnnnnnnnnnnnnnnnnnnnnnnnnnnnnnnnnnnnnnnnnnnnnnnnnnnnnnnnnnnnnnnnnnnnnnnnnnnngggtcggtcgcgcccctagcaatcacgagtcgagctttgtaaactaaagcgaccgttaatgatccattctctcagacgttggcgggggctaactcaccatgatcggcagcgtgggcgataaccagattaaggtgctcctcactgtcctcaattccacaaattgtgaatagctctcgtatcttctgggctgtcagacccaaaatggccttatccatggcgggcgatgatgatggcaaaagacaaagactgcgtcttttgtcaatgaagacagaaatccttctggaacgttcggggcaacggttgccctctggttggggggagggaagaatgagccaattaaatcaaacacaggcgaggctcacaaaaatagtatcaaccaggctaaggcaagacttgaccgggattgaccccctctttttgttgtgtttgtgtcggccatttgcatatcaaagagcaaacaaatcaaaccatactattatataaatagttctttccgtaaccttcaccatcaggataggtgtaacgcctatctggtatatgccttgcgcgcaaggacaggacagagctttagggaatattggtatctgcgcctgaattttcgaatcatatcctcaggcgtctctccgtatagtttattccaaaaatgggactgttctcgatgcgccaaaacactgaccgcaggaatgaatgtgaagccgatgcatggctgcacgatattccaggctgagcaatatcccaaatcatgtgcgatgtcggtcggatgtggtgaggagtcgatttttcgtagaaatcgaggctcgactcaagacgttgaggtgaacatttcgggtgttcaggacacgggtgagcgtccatgaatatgagtaactcagatgatttcgtgattgactccgagtcaactgttgaacagttgaaccggaaatggtaaaggttggttatgttggtcatttaaaagtggtgatgaaaagcaataaacggatggcaggtgagagacgcggcctcctggacaagagtacggtggtcaattactgccaattactgccattggccgaatacacccacgcttcctgggccccgcacactatcacgtgtatctcctaaaccttgagtcgcgctccaagttaactgcgtgaaatcgtttaggcctctgtggtcggtcgatcttatgccacgtattcaatgacagctatttagttaactaaaaaaaagatgctttccacgataactgcaccgcagaataaatgagggtagaataatagcgtgcaaggagctgtaaacgagtgttaaaggccaatcaatgctggtgaaaggataaaggtcaacgggcaagagtaggtttacagctggtgattaaccaattgaattgattgtccctcggcaatctgactacgaaatggtcgaaaagaataacaaaccgattaattcatttttttttaaaaaaaacgcagtgaaagaaatagggtgtttattgagtatgattggctacgggaaactccccactattaattatcctttggcatgcccatttttccgccatattctccaggcctcaagtaccgttcctgttctaactagttagtacctgactagttattttggggaaaataaaataaaaaaaggctcttaaggcgagaacctcaggctagctacgctatacagttgaccgaattttccaaagcagacattcattgtttacttttggccctcaaaatcagaaattccttattattaacggacctcgacgtgatacattctacatttacgttcatcacctactagagtgaccgtttcggatttttgctggtcataaactcggaaacccgcagtttctggagcgcactcctcgattgcctctagccgtggttttcaacgtaaattcggcccgctataaatctattacctgcggggggaccgtttcaggtatttgttggccatgaactctgaagaccacggtttctagatcgcaccactccttttcaacgcgaaaacccacgaatataaagaggaccgttttgtacgtgtttgtagccttaagaatccctaagagccacttcgtctatacctacgactatttaggttgccgtttccttcagtcttctctaacagtgacgcgtctctttatatagcttccgcttcttccgcctagtgcaatcgatctaaatcggtcagaaagtctaagcgccaaaaataaggccgtcgaaaatcaagccttataaaaaaggtggccgaatatagtaaggtgtgcgatgctgacgtctgtgttggcatacgccttcgggaaaccggccaagtctttctcttattagcggatgcttcgggattttaggctttctttggctcgcaattagtatatttctatatctctgatgaaaagtcgactaacctatcaagaactcctactaaccagccccaaaactagtaaccgaccaggatctaaatcttattgataaagatacgccggaataatatacataaagtcgtaacatgaaagcggtacttccaccatactaaaacctttataattaatgatttgtttgctttcatcttagtcagcgacttgaaacaaccattagtggtctttcttaatagttcaaggtagtgagcgtacatcaagaggagcagagctgatctgtggcctagcccaaacgggcctagtgaggggtacaagtatcttggcggtggggcgagagacaatttctctgtgtaacacatggaagccaatttcgaatattgctgtaaagcacgatgagctgtggttccgaagtggattgatcttccatacgcatgggttctcaatacgcccgaggatcacgggaatctaaatggcccaagttatatggtcggtttatcgcttgtgtaattcaccgccgtagcaacaagtcgatttctatatgtatgattaggcctattgatggattgatgggaagttctcatgaagattgaagttcagctcgcgccccagccccagcttgttggtctcaccgatcctgttcttgtagaagttcaagcttcgctccatgatcaccgtcaagtctccgaggatttcggaggattgccaactttacctcgtccccttcctgggtcaagcacaggtatgcggcagctctgcggttatcttattacgttgactgatatttcccagacaacccgattgacgttgatgctctcagtgacccagatatcgaaactcgcgtctatcctcatgacttgccccgcgccggcgacagtattggtttgttgaggtacttctcctgccggagacaatgaactgatcagcagctaaagaacccgatcgatcttgatgcggactctgtggcagtgagcgatacaactaaaccccttcccagcttaccagcaagcccggccccagttgaacttagaccagatggtgaggaacgacttgaacaagcctcagcggcaaatcaagcctattttatatcgacctcttatccttgcaatgatgaaaagtagtccttcacctctcttcacacactcagtctacttcgcaataagaatgaacactcttctaaggcttgcacctaccatgcgggcaggggccttgaccatcacaagtctcagccggaagcaagtcaaagattttgcacaaaattccactagaaaggcccatcccatacattcaaggctcacgactgctggccacaagtgttcggtcttgaaatcacgggcacagtcttatcatcgggaaggaggttcctttcaaccaacccagttaggtgaacttcgcttcttccagataccgttgccatcgtccaaggagaacttttaaccttccctcggggatgatgctgagcggcctggggtggtgccacccaacgctagactgctcttacgaagactgatttcagaggctgattccagactgccaaacagggggaccctcactgctctcggagaacttctttgtctagacacattccacttccgaggatagctcccataacaggcagttgaggcctacattctaagttatcatatcaatcacgaatccttcagcctccgcaatgcgtggggaacatgatagtagagtttctagagtgagaggtctaccatagatgtacgttgtaaaacagcctactagaaaactctagaaatagtacaatacaactgtcaattgaacagacttgctcctcatactgaacacagttctttcctgaccgcaacaaaccactactgcttacccacacatacatagtagccaagccacaaattcttgcagccatctcccacatagggattccacgcgaggaagtcggcctgtgagatcccgtactgcgttgcgatacttgcacatatgtctccatcctcaaccttgtgaaactgaatacagccatcgaccatcttcggcaaggtgggcgttggcgtcgcctcagaggtcggtgaagggctcagtgtggtggtagggctggggttagagcttgggctagcctccacacagacataattgtcaagccacagatttgtacaattagttcccacatctgggttccacgtcaggaaatcagctcgtgagatcccatattccctcgagatcgttgcgcagttgtcaccgtcaaccaccatatggaatttggtgcagccttttgtcatatttggctgggttggggttggagtgaccacgcctggactggtggatgtgggtggaggggtaccactagtagacgtcggtgtcgagcccacgcagacataattgtcaagccacagatttttacaatcggctcccacgtctgggttccatgtcaggaaatcagcttgtgagatcccgtattccttcgagatcgttgcgcagttgtcaccgtcaaccaccttatggaacttggtgcagtcttttgtcatgtttggctgcgtgggcgttggagtggcgatgccagaagtggtggttgttgctggagagctatctgttgtgctggcactgctcgaggtaggcgtgcagcttgtgggaatggcgctcggggatggggacggaactgggtctgtagggcccaaatcacaataactttcgtaaagcgaatagcagttatccgatagatcatcctctgggataaagccgttattctcatcttcggcggtaatccagcagtacttggttcgttcagcgagaaggcttgagagtgtggcgtttggcgtgaatgtgggaatggaaggcgtgtagtttggatcaatgataggcgaataccatgaagtggtgatattatccattgtggttaccggagttcctggtacccatgaggtaattaaagaagacggaagcccggcggatgttttatttgtgctgtcggggaggctgaactctcctcctcctgggggcctatttcaattagaatagctccatgccattgggacacgacttacgatatgcaaatacttcttcccaccatcgaatcaagattatcgcagttttggtgtattgttctgaatgcttggtgagtccgctgtcaaaaagtcaagtcgaaggtaggctaacgtacggattccatcctatcagttgcaccaatccaaatgactgggctttgataatatcattgcatgtttgattctgctgcactgtaaacacagtacaggtgtcttggatgcaaagcggcgtcccagaaatgagcattgagcatgaatagtcaagtttattcaccttgataagctgatcggtactgacagagttagctttagaaattgacttgcaagtatccccttcgatcgatatataggtgtggccagtacaagtcggtgtggcggtggtcgatgttgcgcctgttggcgtggataccatcgtggtcgccgttggcaaaggcgtgtaggtatacggatagctcgaggctggaacgctgcaagacgaaagcaatgacgagaaggcggctggcgggaacttgttacgtccgtaatcagagctcatcatgatcgagccgtacttcagggtgcaatcagaacacggggccttggttcgattatagagatcagccaaacagtacccagacctggacttggtcagtgtctattccagggcctatacggcctttccgcaggagatacacacgcgtcttggatacacatcaggctatacgcccacaccaacccatcagctaccaccgcgggcgattgcgttgtcgtgctattcttgtataactggtactccttctttccgcaggccgaaaggatgctctcctggaaggtctggagggaatcgtgacattctttcgtgcaatatgtcttggcagccaccccaaccagtgcggccccattcgcagcatcctgtgcagtaacaaggctgttcgcgcaagtcatattgtaagttagggcatttcgacaatcagaggggaccgcggtagggatgtcatctagactgtcccagacctggatcgcagcaacattttgcccaaaaaagggcaaaacgaaggcaataccgacactggtgagaagcattgcgttcaatgtcaacaagtcaaaaaattttaatggtttctaaagtcagaattcgggaaaagcctccataactgtgtctcgcgggagctcggaagttattcctcttccgaaaaaactataataaccgatggatggtcttataacactaagacagcgctagagtaaggtacttacataaattagtaggatgcacgaaatttggcccccatcaaaccctctcggataacggattggggcttggttagcttaattgcactactgcacaagtaagacatcttaggacccacttaacccacaaacggagattaaatgaagcttcttaggggcagcaggatcccaaccctcgaggttttctttcttggcagcgcactaagaggtgtgatttagcagtagttcaattcttccacggctatacggcactgaagttggggtttctcattcagttagaaacggagaattcagctaaagcagccaatctattattttagagctaagaggatgggcaagtcgttgatattccaaatttactctaggaaaaatccccctccttcgttcactccttttcttgctttcttttgtcctgtcactctctacttataaaatatttccgacagtgttgagttatccatacccgactcgcttcacccgtacatgggatcatggagagacccttccatttgctctggaagatgaactctcttacctggccattgctgtttatctgtttgatattgcttcagcttccctcggctattgcccagggacctggtgagccgggaggcacttgcacagattcaattccatgttaccaaggctgctgtagcaaagactatgcatgtggttttaccgacgctcattgcgggactggttgcaggagtaactgcaatgcgacggcagagtgcggagagttcgctgctccaggtaattctgactgtcctattaatgtctgttgcaggtaagttagcggtccgacccagggggttttcgttctaacgactaacggttggcagttcattcggatactgcggtgtcacttctgaattctgcggcaacggttgccaaaaaaactccaatggtgggggttgcggcgaaccagagtatgtctgcttcggccgctcatgtggaatataagtactaaaaccattcagtcgcccgaaatgctccgagaatactgatgccatgtcctatgatcgacgtattggatattatgagttgttcaacatccataaaggatgcaatgtgattgagccagagagtctgatcattgagccgtttactcatatcaacctggcctttgtcaactttggtgacgatttcaagttggaagacgagtacggcgacgttgtggaccgggtgtcgttcttgaagtttacccacccagggctgcgggtcaacatcgcggttggggggtggacctttagtgatgctccgacgcagcacctttggactcagagtaagtgactcaattggcaatttgaatccatgcgcacactgacgctggacgcagtgacacgctcatacgagaatcgtcagaccttcatcaactcagtggtcaaatacctgaaggattaccaccttgacggtattgacattgactgggagtatccgtccgcatcggatcggggcggagaacctcaagacgcggcgaattttgtgacccttttgggtgagctgcgggaggccttcgatcgcgagaatcctggctgggagatctcggcgacactcccaacgagctactggtacttacgcggatttgaccctgctggcatggctaaatatgtcgactacttcaatctcatgagctacgacctgcacggaatgtgggaccaagacatcacatggactggtccttacctcaaaggccatacaaacatcactgagatcgacctcggtcttgaccttctttggcgcaacggcattgacccatccaaggttgtctttggctttgcattctatggtcgctcctttaccatggcagaccccaattgctatcaacccaatggcaaatgcgaattctcggacggtggaatacctggatcatgctctgacacctcgggcatcctgacatacgccgaagtcacgtcaaggaacaactcccttgatgtccatacgttctatgatccggagacaacggtcaaatataatgtttacgaggggacccagtggatctcctatgacgatgagcaatcatttttcgacaaaaagaagttcatctccagccgatgcctgagcgggtggatgatctgggcaatcgaccaggatgatggcgattttgacgcacttgccggagttattggcgaggacctctcagtcatgcagatggagggtggtggcttatccggggatgctgccaacgtcctggccgacgcctttgccgcctatactggccaaaactgcttcgtcacaccgcgctgcactgacggctccagtggggagaagaaccccgaccaggtgtgcccatcaggatacatgtcggtcagcactgcacacaatcccctgcaggcgggcaataaggagctccgtggcgactgctctgagggatggtatcggcacatctgctgtcccgaggatgccatgcccaagaactgcgaatggaacggggcgcccgagcgaagcgagttcggctgcgacggcaaatgcgggagcaaccagttcaaactgaatcaagacaccgcgctggacgccaaaggtgaagggcaatgctttattggcgaacgctacctatgctgcgattccgcagccatgttctccgattgcaggtggaccaattgccaagggccgctgatgccttccaccccaggcgaatgcccggcagacaatgatgccctgacattccgctgggataagccggatggcaagccgtggtgctccgatacttacgtatcgtctgtcgacggctctgttggtagcccgctgcacgaccgcttcaaaagcgagctctgctgtccatcagatcacagttttagcgtcagtggttgcgcatggaccaacaccctttcccaggctgacatgacagacgacgactgggcggaacatctcacggatctcgtctgtaaaccgcgtccctgctcacctggaaaggtaaaggtagctggtgcgctcgatccgccaccggcgacgggcgcaggatccaagtcggagattaactgcgctggagtcactatcccgcctggcagtaatcctgaatggtcgttctgttgtgatccaccgagtcgatacgacaagaactggcccgttgatcccaagtacctatgggaaaaatactataacgaccctaagaagtcggatgtcgtttgggaatacagcgatgagtaccagaacaacaacatggatagcgagccctctacggaggaggatggcagcgacgcctatggatttgtgatgctcgacggacccgatggatccatcgacaacgacttcgcgacgtcgcataccgttgtacgtcgttcccgggaaatcccccgagtcaaacgttccgttttaacaacgaaccaaactctcatggataccgtcttcgaccacgcggaggagacattccatttttactgcgactatcccgcaggatcccacgaatgcgagcgtgtcttcatcgatggcgccgaggacacaatcatccggcttccagaccatgtcggcgacggcccgtttgcccgaattgtctccatgaaaacagcccacgacgagtatcaacttccggatcatcatttggaacatcggtcgctcgagcgcaacacgaaccccgtctatgaggtgaagatagactataatttccatctgattaagctcaagcgagatgatgagcccgtgaacattcgcgtggactatacgaatctgatgggatactgggatgaaatgaccaactcgccagctagccgcgcgaaacgtggccttggagaagagggcctcaccaaggatgagtggcgctcccgagttcaacgggccgttgtacgccacggtaatatcgagaagcgtagtgaggctattcatgtgaaaacaccaatggagttctccggctcccacctcgacaagcggtggtggggtgcgttcaaagcctggctacagaaactggcatgtattcccctggtgactgcgtactctttgctccaaatacatactaacgtccatgccagactaaggtaaccaaatccagtttgggcgtgatcgaactgggattctccaagaccatcaacttgttccgggcgcaatggggatgtcccggccagacattctcagctaacctccggatggatttggaagctgacctcgtgatggatgccacttatgcctactatttatccgccaccttcatcccccccggcaagcccgaaacgtttgcttacttcggaatgaatccaactgcttatctcggactccacatcgagggaaatgcgcagatgcagacaacaaccgaccgcaagaagatcattgacaccctttcctatcctggactggccgtgaagggaattgcggcagtcggaccaacactagacatttatggcgaagtaagactttaaaacctcccagtagatatgcatataaactgacatcgatccagatccgaggcaaggtaactttgcatggcgaggcgactgccggagcacaactgtccttcgggaaggcggaggtttactggccgcagaatgatgatgcaaaggataagtatgagacactgctagggctccaaagtgacgtacaggcgcccgctcctggttctgttgagccagtctttgaagcaggtgtggctctggacgcgcaactcgacattatcgtaacaccggaggcacatgttggtatcaaaatcggcggcgggaaactcgtcggcggtgctaccctaatggacgcgcagttaaccggctacgtaatgggcgacttatccttccaggctcacggtgattatgacacgactggtaacgagttcaactacagcttcggagcgtacctcttctacaatctcgggtacaaggccacggcccaaattctcaacttcatcgattgggcactagcgcctcgactggcatacgacccgcgtaagacgttcaagctgtacgagaagaagggttcaatcccaatgtcgtcatcagctaaatcaaagcgcgaggccgccatcgatggccctttgcaccggaatcttgtcgaggtcggctcgttgaccaacggctctatctctacataccttgattccgcctcgggtttgtccaaacgtggtgatgaaatggatatcggtacgtgaaaagtcgccctcttaagtggcttccaaaagtgtcccagcgctttgagttactgatgattccagatggccccaatgctccagagtttacgcagaacctcaagtgccccccgggcaccagtggagacgttcggctgcccgaaattcgatgtaagccaacccagcctcaaccaaccctccctaaacaaaaagtccatcattctttccgattatcgttgctgactgaggacagttaactgtgacttcctcaacgactttattgaagaaggcaaaaatggcaaaatggatgctattaccggtctctgtacgcccgtgctgaacatccctgacaataaacgccagaagctattcaccttctcgaatgacaaattaaggaaggaggcacgatataacgcacaatgtaaatcagggacctgcacgcaggcaactactgacttgcgagaccaccaggggaataagaagctggagctgcagtgcgacgagttcccctggaaatcttccgagcaaggcggcgactatctcgctagtgacgctcgcacaggtacctgcgtggcatcttaccagaataactggcatgggcaatgtcttcgtaagtcacgtcatggtctgttggtcacctttgtaggactttgctgattggttcctatagggatgataggatacatgcaatcaaactgggccaagcttgagcctgagagggaagacggagacaaccgcggcgacttctggcaggattggagagaggattgtatgacactatctttcactcagtcttcttttaaaaagatactaatgccaacccgcagcatggacaaaacctgggcagcacggatctaaaggttcgcaatacgagcagagactgaaggaataccccgaaaagcagcccctgcctgacggagtcaccacgcgagtaagtgtcaccaactcatatccagagaggtaaacaacatttctgactttaattagaacaacgataaaatatcctgggtgtttaaacgggactacgaagtatccttcatccgtcaagacccaagcactatcgatggtagtacgtggtggggagcgacgagtcacaagttccaaaagacgacccacagtggcccatcagggatggatgccatcttttgcgcgattaaccattttggccaggataacgtatataagttgccaaacggctataatggcctttgccgaaggaacaacggtagccccctcacaggttggaatgtcggcttcaacatggctaggtgcgaggtgaagtttgcgaaccccagtagtagtaacaagcgaagtatcggcacctttgctgggtgggaagtggaaagtgtgcgaatgctggatgaggacgaccatgaataggaggacaaaatagtgctagtagtatagaaatgtattctgatcctttgttttgattgccgctatgaaccgcgagactaaacgtaagattcaaagtgttgtatagtctatggtattaagcaggggaatctctgaatcgtataggatattgtaccgtcaacaattgtaggaattaacaaggtggtggtttttatttatatgtgcttcacgggcggactttgatgactaatcagttctgatatcactacatgcaaacagtgcaaaatagtgtttaacgtgtcattttccccgtgctggacaggcagggcctttccatctaccgtccagagctctgttttgttgcccatgacagtaatggacaaggcataccttccgcaatggggccagttacccgtcgagcattacttgatcgtgagtgtcttgcgccaatgttgttgtttcccctgcgtggctaatatctataaagaaacaatgggatcactcctcatctgagcctactggagaccagcgcctccgactgatccatcagttcttagatctagatgagattccgcaggaactggaccctactggtcatacctcggacacttacgaaacactgtcacctacggcctatgagattgacactatccttcgcccctggcgctctgatgacctacggaagatagcgtggaggatttgggggtgtcataatgatcagttgattttgttacgcacccactacaatgccgatgacaaccacaagatcacggaattagtagggtccgatgagctccacgaggagaggacagcctggtgggcacttcttgataatcccgaactcttcaattttggtgaccagtggtggcgagtcttcgatatcttgccagagttagccggccctttgaatggttatagccgcctgccagacccagaaagtatctcacgggagagacaggattttaaggagagactaccgaccctcaaacaaagcgacgaatggacggcgaatcgtgataattatattgaaagagagtttgcataccttcggcgaatagcttcagagggctatcttgctattgcagatcaggaagcttttgaaacagatatgctacggttaatctattatgatgggaagaggaatattgtccaagagacccggacagaattcgatgagcagacatttgctgatgttgccgttgaatgggaccagttgtcgcttcctatgcaattatgggaggacggaaagactggtgagaagtatcgagtgaatggggagctgggaagggagttatatcagctagatgaggctgatctggaataagcatggccatgtcgaatctggtggaatcgtggcacatgatatcgttcgtttgctcgttggcgtcatgtatttaggcgccgcctcttcaacagagggactcttcatcatctttatcgtcaattcaatcgtttatcgtcgttccaactgcttaaacatgtgagcgttactagcgccaatatgatagcaggttggaatcaacgtacagattctcccggaccccggctaggatgcgtattgacgggtcataatacatctggtaaatgcgtgcataagaaccaaccgggtacaccacaacacttttgacagccctcatgatgcagcttcctgtatgcccgaggtgattcttgggtagtgagctctcattggcttgcctgtgccccgatcttaccctctcggtttgaccaatgtcaaattgtaggctaagaatgagaagactttccgtctccttccccttgcaggtggacttgtgctaacagcctgattgtctgcagaggtacgctcatctgccaggaagcaagacaaaacatcagcattcctgcgcctttttccacttctggaaagacatcaaatgtcatccgcagacaacgaggatcacgcattcgataccagcagcctacgccacttgaaggtatttgaaaggttgcatgcttagccacaggtatgattcgggtagtggtataggctggtcggagttcaggagttgtatcatgtagacaaatcgaacaatgacctgatacacagaatctagggagaaagaggccgaggtacgcgatacgaatattctggtgactcatcgtcgatagtagtcatgcggaagggacagagagcatgcgacagtatttgtataggggagctcgagcagacaagacatttgttcgcgtggcattcgactcgagtgatagaaatgagggtgtcctgttatacgatccgagtcagcaaggattgatctagttggacgagttgtcgtagcgtacctgttcatggaaatccccaagtacgctcgagacgggacaatcagtttgcgcaatgattatatcggcttcacaactagatcacttacaactttctgcaatgcagttaccagccatgccacgtcgtattcaagctcatcgtaatctgcactcgcttcaaaaaagccgcgttggggtgcacaagacaatttgttgagacagtaaacgcgcgttacgaacccacttgcgataaacattgcacttccatggtggatgaatgtgtcgcgatgccagaggtccagggactccatagctgtatgaaggtggtgggacgagggcggaagacgcgatgaagcacgctcgtcggccgctaccttggtcttatcttcgatctggcggaataggccactcgcacagtatattttaccgtcgatgatggggtggccctataatagcgtgaagatgtcagcggtgttcgtggttagaggaataatgcttggcgcggatggtcagacacagcgcagctgtaggcgttagatctcacttaccttagcatggaaatgggagtctcaaggttctatgcaacgaagttcgcacatggatggccgcaccctgttgttgactcgctaccttggtttgcgatcttctacctaggacatgctgcattgttcgaagcgacggggctaggaatagtgtgtaagccatggctttgcgtggagcactgacggtagtgcaaggttatcagggccactctggtgagctcccaaaggttcactgtcaattatcagccagtagatcagcgtgggatcccataactcacatgttctgatagtcaacaccaggatgaagagaccacaagaagctgtggcccttgcactggcgtatggtcgaatgtccatggatctggttgtcccgcgtctttcaagtcagtacagtttcaaacaggatttccagacctctacatatctacagcataaaccctaagccgaaaacttgggttttcacatacctaaagtatgagcagttgtgcttcaaatttgaagtccatccagaggcgtgacagtagatcaactcagtcggctgctatagcagagacgacttcgcatagacactttgaccagctaacccaaatctaatatatttgattgactggcgtgaatgggacagtgaagctgcttggaatcacatctcttacaggcactgtctgatttgctggtccacaatgtatactataaatgtcagtacggtataaattccagtattccatcaaaagggagaacttatcgagcgcgtcagacacaagcctctcgacgttgcaaaaccaggtgaataatcgtagagtaaattgccggggatagaggacgtatttgtaggcttctcggtttctgtcaaccaccaacttgataggaggcgttgaaggacacatttcttgattgaggcctgttgagacccacgtgttgaatttgcagcaactatttgcagcgacatatttgatggttttacgtgcatatctttggttttcgtgttctacgtttttcttcattattatttttcctctttttctattgtccgcactatgttgccttctgcagaaagcgaccatgaatttgctagagctcaactgtctgtcgtattggatctctgccttcctagagtcaccacatcaagctatactagtttgataacagctttagttggcaggacgcatgaaaggaaaaaggaaatgcttaccaagaccatgccgaaataggaaccttctcacttaaggccaaataccagtcatcttcacgtacttagacactagtttttcaccttagggtcaacacgcggttacgtttcactgcctattgacatctctaccgcgatgtgtcttcctcaattgtggaaattggtacagacgtcggtggaagctacagtatgttccgaaactccaatggctatacagtgcgccccgaaactgatgcaaccacctaccctcttcgattgattctcgaggctccaacgccaaaacgcgctctatattgggggttcttccggagtacccctgtcagtaggatgtgtaagttattannnnnnnnnnnnnnnnnnnnnnnnnnnnnnnnnnnnnnnnnnnnnnnnnnnnnnnnnnnnnnnnnnnnnnnnnnnnnnnnnnnnnnnnnnnnnnnnnnnnnnnnnnnnnnnnnnnnnnnnnnnnnnnnnnnnnnnnnnnnnnnnnnnnnnnnnnnnnnnnnnnnnnnnnnnnnnnnnnnnnnnnnnnnnnnnnnnnnnnnnnnnnnnnnnnnnnnnnnnnnnnnnnnnnnnnnnnnnnnnnnnnnnnnnnnnnnnnnnnnnnnnnnnnnnnnnnnnnnnnnnnnnnnnnnnnnnnnnnnnnnnnnnnnnnnnnnnnnnnnnnnnnnnnnnnnnnnnnnnnnnnnnnnnnnnnnnnnnnnnnnnnnnnnnnnnnnnnnnnnnnnnnnnnnnnnnnnnnnnnnnnnnnnnnnnnnnnnnnnnnnnnnnnnnnnnnnnnnnnnnnnnnnnnnnnnnnnnnnnnnnnnnnnnnnnnnnnnnnnnnnnnnnnnnnnnnnnnnnnnnnnnnnnnnnnnnnnnnnnnnnnnnnnnnnnnnnnnnnnnnnnnnnnnnnnnnnnnnnnnnnnnnnnnnnnnnnnnnnnnnnnnnnnnnnnnnnnnnnnnnnnnnnnnnnnnnnnnnnnnnnnnnnnnnnnnnnnnnnnnnnnnnnnnnnnnnnnnnnnnnnnnnnnnnnnnnnnnnnnnnnnnnnnnnnnnnnnnnnnnnnnnnnnnnnnnnnnnnnnnnnnnnnnnnnnnnnnnnnnnnnnnnnnnnnnnnnnnnnnnnnnnnnnnnnnnnnnnnnnnnnnnnnnnnnnnnnnnnnnnnnnnnnnnnnnnnnnnnnnnnnnnnnnnnnnnnnnnnnnnnnnnnnnnnnnnnnnnnnnnnnnnnnnnnnnnnnnnnnnnnnnnnnnnnnnnnnnnnnnnnnnnnnnnnnnnnnnnnnnnnnnnnnnnnnnnnnnnnnnnnnnnnnnnnnnnnnnnnnnnnnnnnnnnnnnnnnnnnnnnnnnnnnnnnnnnnnnnnnnnnnnnnnnnnnnnnnnnnnnnnnnnnnnnnnnnnnnnnnnnnnnnnnnnnnnnnnnnnnnnnnnnnnnnnnnnnnnnnnnnnnnnnnnnnnnnnnnnnnnnnnnnnnnnnnnnnnnnnnnnnnnnnnnnnnnnnnnnnnnnnnnnnnnnnnnnnnnnnnnnnnnnnnnnnnnnnnnnnnnnnnnnnnnnnnnnnnnnnnnnnnnnnnnnnnnnnnnnnnnnnnnnnnnnnnnnnnnnnnnnnnnnnnnnnnnnnnnnnnnnnnnnnnnnnnnnnnnnnnnnnnnnnnnnnnnnnnnnnnnnnnnnnnnnnnnnnnnnnnnnnnnnnnnnnnnnnnnnnnnnnnnnnnnnnnnnnnnnnnnnnnnnnnnnnnnnnnnnnnnnnnnnnnnnnnnnnnnnnnnnnnnnnnnnnnnnnnnnnnnnnnnnnnnnnnnnnnnnnnnnnnnnnnnnnnnnnnnnnnnnnnnnnnnnnnnnnnnnnnnnnnnnnnnnnnnnnnnnnnnnnnnnnnnnnnnnnnnnnnnnnnnnnnnnnnnnnnnnnnnnnnnnnnnnnnnnnnnnnnnnnnnnnnnnnnnnnnnnnnnnnnnnnnnnnnnnnnnnnnnnnnnnnnnnnnnnnnnnnnnnnnnnnnnnnnnnnnnnnnnnnnnnnnnnnnnnnnnnnnnnnnnnnnnnnnnnnnnnnnnnnnnnnnnnnnnnnnnnnnnnnnnnnnnnnnnnnnnnnnnnnnnnnnnnnnnnnnnnnnnnnnnnnnnnnnnnnnnnnnnnnnnnnnnnnnnnnnnnnnnnnnnnnnnnnnnnnnnnnnnnnnnnnnnnnnnnnnnnnnnnnnnnnnnnnnnnnnnnnnnnnnnnnnnnnnnnnnnnnnnnnnnnnnnnnnnnnnnnnnnnnnnnnnnnnnnnnnnnnnnnnnnnnnnnnnnnnnnnnnnnnnnnnnnnnnnnnnnnnnnnnnnnnnnnnnnnnnnnnnnnnnnnnnnnnnnnnnnnnnnnnnnnnnnnnnnnnnnnnnnnnnnnnnnnnnnnnnnnnnnnnnnnnnnnnnnnnnnnnnnnnnnnnnnnnnnnnnnnnnnnnnnnnnnnnnnnnnnnnnnnnnnnnnnnnnnnnnnnnnnnnnnnnnnnnnnnnnnnnnnnnnnnnnnnnnnnnnnnnnnnnnnnnnnnnnnnnnnnnnnnnnnnnnnnnnnnnnnnnnnnnnnnnnnnnnnnataacgaacaaatcacggaattagtagggtctgatgagctccacgaggagaatgtagcctggtgggcacttcttgataatcccgaactcttcaattttggtgaccagtggtggcgagtcttcgatatcttgccagagttagccggccctttgaatggttatagccgcctgccagacccagaaagtatctcacgggaaagacaggattttaaggagagactaccgaccctcaaacaaagcgacgaatggacggcgaatcgtgataattatattgaaagagagtttgcataccttcgccgaatagcttcagagggctatcttgctattgcagatcaggaagcttttaaaacggatatgctacggttaatctattatgatgggaagaggaatattgtccaagagacccggacagaattcgatgagcagacatttgctgatgttgccgttgaatgggatcagttgtcgcttcctatgcaattatgggaggacggaaagactggtgagaagtatcgagtgaatggggagctgggaagggagttatatcagctagatgaggctgatctggaataagcatggccatgtcgaatctggtggactcgtggcacatgatctcgttcgtttgctcgttgggcttcatgtatttaggcgctgcctcttcaacagagggactcttatcttcaagcatcttcatcgtctttatcgtcaattcaatcgtttatcgtcgctccaattgcttgaacatatgagcgttactagcgccaatatgatagcaggttggaatcaacggacaaattctcccggaccccggctaggatgcgtattgaccggtcataaaacatctggtaaagtcgctccctccagaacagtttacggtgacctccttcgtttacgtcctcgtctcctctattcatctcggaagcgcctcagagggtaaattggtcctgcgacgggtacgtcgcaatgacagtctaggatctcttcaaatctctaatcctaccacagagtcaatcactcaagaccaactcctcgcaaaaagatgcacctgaggccagatcccagcaattcccgcagctccacgcacattgagagagtcagacattcctaatggcataggaatgaaacccgattgatgagggaaccatgtacaggtctcaactatacgtatcactctgttcagcgcccctggccagcagcagccgcattatggcctcatgtccgttggatgatgcctcttcaaacgcactgccgcggtctccaccccgtacgttgatatcggcacctcgagctagtaggatctgcacaaccttttcatgcccctcggctgatgcagcttgaagtgcactgtggagcccttcactgtgagaattgatgtccgcgcctcggtctagcagaagatgcacaatcttctcatgtccttcagatgctgcgacatgtagtgcagtgccacactcctcatcattgagattgacatcggcgccccaatctagtagaatctgcataatcttctcatgcccttgaaatactgcagcttgaagtgcaagtgacataattctcactgagattgacatcggcgccacgatttagcaaaacctgcacgatattctcatgacctccaaacgccgcgagttggagtgcactactcgactcccaattggcattgatatctgccccccaatctagcagcatctttaacgtgtcttcaaaccctttagacgatgcacacatcagtgcggtaaggccgctttttcccggggcattgacatcggcgtcacggtccaacagcatccggacgattgcattttgtcttttgttcaccgcgtgagtaagtgtcggatagacgggatcgcctttgatactccgatctgcggcttgcatactgagatccgcaccgtggtcaagtagcatctgcacaatggtttcatggccattggatgatgcaaaatgaagcgcagtactgtcatactcccctttccgagcattacactggcgcctcgatctagcagtacctgcacaaccttctcatgccctctttgtgcagcggtgtgcagtggattccagagttccccttcctgggcatcaatatcagcaccgtggtcgagcagtgaccgtacaatattggcattcccgctgaacgacgcggattggagtgcactgcctttatccaagtccgaggcgttggcgtctgcgcctcgatctaggagcatttgtacgatctcttcgtagcctcgatacgacgcagcttgaatgggaggactgtcataatattgcaactcttggtatttctcattttaatgatactaggaggaggtgattgctctagcgatcctcgcctcgaggacttcgcccaagtaatgtcagctaccttgctctcctttttgcttattctcaaagtgaggcgatatctggcattctcatcgcacttgcgtgcacatactatatccatgtatgcaatatcctaccccacaccgagttgggcggataggttcgtgccggcgtgctggcgggctgtcatatgtatgagatgcatactcgtctggcaccacgacaaaagatagagacgccaggcggcacgttctgattggggttttaaaggaatgtaagctacgttgtgccaataggatccgttgtctgcccctagtgcgggctgctgcatccgcgactcgaaaatcatagaacgaggctcgcaggaagaacagggccacgttgcaaacctcatgcaaggcctgtgaggtgttaagtctgactggagtcccaggaaatcgttgacctcggtaccaaagaatatcccaggcgaagatgactcgggttgcagcttgggacgctctcgaccttcaaattcaacgacgggaaggggcgtgtgccgtccaaaatctatttctcgtcgaaacgagcggatggcaaaatggagaagcagtaggcaacgttgtcgggtcaagtagctcggcccctttcgagataattgtccagatggctgtgtcatgatatcttttgaggatttcctggcctgcaaggaaagcattctcttttttcagcagggagactgctcgcgcatagtcaagcttagagatatagtctatccattctcgaactgaatgtgcttgacggtgtctcatctcaggagggccggatactcatcatgaccacgaaccataggcttttctcctaacttcctccctccctcgctcgatggcgatatactttgcttcattacgctacttgggtgaattttctggccactttctggttcgagcccaatactcgacaggcaaaacctgttgattggtctcgctgaagactgtagtggcaaaatcatgccagaggttgcaggtgctttcactctgtcaacgtgtaatgttcaacattggacccagcgttactgtacgtgatcggcgccctcaattaattgagcgcgttgaaatctgtcctcccggccgtccgccaacgacctcaacaagcggaagcccttaactgctggagacatacatcttaccaggcatgttcagtccttacgcaggataccgaatgctcctatgatgagacattacgttcctgggaacgaggtgtctgttcctacgaaagggttgacatttcacaggaatagcgtacccatacttgtgagtttatccactttcaggagtcttacagctgttctgtggagttgcctcgcaccgagtccgtgctcttgatagtctgcattgtggcttatgtggtggcttcggtgtatctttaccaacgagctccagaccctggtggttactagttttggggctgtacaatacgacaagttctcattgtgaggtgaaagcttattgtggaggagagccagtcggccactaataacttctgggagctgtaggtcctctgagaattctccatacgtgtccatgacagttgtactataggctgcgtcgatcgaagatattgcaagcgtcttggttggcgagtgtgggttttcgtaagtgtgttttgcacggtcatgttttgctactccaaggtggagaaaggagtgagagaggaccaatcacacgttatatttccccccgacacgcccattggatacatggttgtgaagcgccttgttttagacgacatgatttatggcttgctggactctctagtcttgtgcggaattttgcagatgttgattgccaggactgaggacactcccgcactatcactccaaatataccgtgtgattggttcaccgctactcatttctccaccttggagtaactaaattatttgttccaagaggtaagtcatatatctgtaagagtggtatcatatgacgtatagcctctcctaaggcttgtgctctccggtgatgtctcatataaacgtattactctcaagaggatcctcacaaaagggtttccctctgaaaacagggcccttaatacgttcttttcaagctatcgtgattccagcaacgcatgattgtactctcgtgatagcctgcttatagtgaaacacacaaaatcctctgtacgttatacatgcagaaccaacagatgcctctcggatggtaaaatgtcctgagacgtttctctagtaagtacactcatgtttgtacaaccaaagctcccagggtacgacctctcggtccggagctatacagttcactcccgggagctgtaggtcctctgggaactaagatttttactcctgggagcaatcataagcgttgtcaaggatatacatgaagcatacggaatggatggagatatgatctgcgcgggacccacttagtgtatatgggttcccctgaacgcgagaaagctacctttcttttgcttcctcgcgctacgtcttgtatctagagtcaaccatagttgttcttaatatcgattgttcatcttgaaacactatccacctctatgtatacgtgagaccctcacaagcatgcctaggaaccatgccataggtcctggggtcgaatatgatcccaggaacgtgagtgtcgcactcgcgagataaaatgtggaatctggaatgggtaatcaatattagaaatacaaattgaaatgcgggcaataagtgcgggcaacagaaagaagtgattaactgggccaaaaaaaggtgaaaagacactgttcgaagagagaaatgatgttgatgaacgataaaatgcaacagttgtttgggagttgactcaacgacgctttcctcgacacatatcagtagaataaacgaaacgtcatcgactagtggatgatagacaaacatgagggtcaacgggcaagcaaacttgtagccggtgattaaaccaatgaattggttgtctcagaatccgagtacaacatggtcgaaaataataaataaacgaattcattcattcgttttcttgttagaacaagtgaaagaagtaggggtgtttattgaatatcattggctagacaacagtctctactctaaatcacgcgcatttcctaatacctaggtaccccctaagtctactgtaagaatttatttcaccctgctcaccctaagtttgatgtcttcctagataggcctgtggtatgtccacttttctgccatatttcctatgtctccggcctaagcgctcttgttgtacctgttggctaataacagttctctataataattaaaggaagccatgtactgaagctcagcgtggaaaattcttcaatctttatgagaacttcctatcaatctatcaataggcctaattatatatatagaaatcgacttgttgctacgacggtgaattatataagcgataaaccgaccatataacttgggccatttagattcccgtgatcctcgggcgtattgagaacccatgcgtatggaagatcaatccacttcggaaccacagctcatcgtgctttacagcaatattcgaaattggcttccatgtgttacacagagaaattgtctctcgccccaccgccaagatacttgtacccctcactaggcccgtttgggctaggccacagatcagctctgctcctcttgatgaagggtcctcatttctcgttcgtccaaataatgactggaatgactgggtgttgtgttttgactctggagtctataagacttggggattgaaacttaggcgccctggtaggggtcaacatttgagtaataaaattcttcagcggtaggatcccgaaagcgattgaagatagggccaagtcagccgcatgttctcttagatcgaccaaaaccctgcccagtgcctccatcacgcgtcgttgattgccacccacagtccctattttgtgaatacagtacttccaaaagggggaacgcatctcagcttgctaaaaccaaatcatggaccgccgatcattaccgaacgagcttatcgaagcgattctcaggcaagtagacatgcaaaccgtcctcctcgcccaacgagtctgccgacaatgggccctatgcatccgagcatcttctccaatgcaacaaattctattcttccaaccagcaccagccaacaggccacgccaacaaaaccccctgctagcatccaaatttccatactggtttcccgccgatgacactaagtcatgtgccatcgcctttggcgccggcgacatgcaggatttcctagagagcagcgacatatatcggcggccggaggcgagctggcgccgaatgcttgtccagcaaccacctatcatggcgctgggatgggtggagcgtagcgtgtcgccatccaacgtgatagacctgcatcgctgggaaattccactgcaagcacttggtgggttacaaatgaacatactgtacgatctggtcgtgaatacttcggaggttgcgccggaatacttctatttcagagtcttatggtcgcaaagtaagactttaagcagtagctttgctagccttcgctcagatccatgtccgtctttcaattcggacaggatcgatgggccactcaggcatgcaatgcagggtgcggatgtggttcttgatatgtggtatacaagtcaaatgaaaaatcatctctggaagggatggtcgaaagatacgtggacatgggagcttgtgcgggggctgaagcttgctatggatgactttgatattgatctggtgcgctgcatgagagagccgaaggaagtcaagagctggactttggcggaagagttgagtgactacgctagagaagtaggacccgtcgaccatgctatgcctttgcctgatgaggatgacccggacctgtaatgttaaggatttggaagtatctgaaactcatgatattatttgatgttatggttctatggtcgtagcctcgtcatcgctatgcacagtagacaaccccgagtctgccttgaatcgctatctcttcgacggaccgagcttgtactcatggagtatcgaactcaggccactggtaatcgtcataaatttgcgagacgggtcgtgcaccttttgtctttcgagacgaacggcgaatggaatggtcgtagtgtatgggcgatagaagtgctcgaacagaccgcatctgactccgtaagccgcatcggtttgagggcaggaggatgtggtatatacaatgattcaacgatctcagcgtatctgctttctgatgagcagagctgatctgtgacctagccgaaatgggcctagtgagattcactatcgtcttggcggtggggcttgagatagtttctctgtgtgaaatgtggaagccaattttaaatattgccgtatgcttactaccttgaactattaagaaagaccactaatggttgttttaagtcgctgactaagatgaaagcaaataaattattaattgtaaaggttctagtatggtggaagtaccgcttttatgttacgactttatatatgttgttccggcgtatctttattaataagatttagatcctagtcggttactagttttggggctggatagtaggagttcttaataggttaatcgactttttatcagagatatagttggaaatatactaattgcgagctaaggaaagcctaaaatcccgaagtatccgctgataagagaaagacttagccggtttcccgaaggcgtatactaatatagacgttagtattgtatatcttactatattcggccgccttttttataaggcttgattttcgacggccttatttttggtgcttagactttctaaccgatttagatcgattgcactaggcggaagaagcggaagctatataaagagacgcgtcactattagagaagactgaaggaagcagtaacctaaatagttgtaggtatagacgaagtggctcttagggattcttaaggctataaatatatacaaaacggtcctctttatattcgtgggttttcgcgttaaaaaggagtggtacgatccagaaactgtggtctttagagtttatagctaacaaatacctaaaacggtccccctgtaggtgatagattcatagcgggccgaatttgcgttgaaaactacggctagaggcaatcgaggagtgtgctccagaaactacgggttttcgagtttataactagtaaaaatccgaaacggtcactctagtaggtgatgaacgtaaatatagaatgcatcacgtcgaggtctgttaataataaggaatttctaattttgagggctaaaagtaaacaatgaatgtctgctttagaaaattcggttaactatatagcgtagctagcctaaggttctcgccttaagagcctttttttattttattttccctaaaataactagtcaggtactaactagaataggaatggtacttaaggcctggagaatatggcagaaaaatgggtatgccaaaaggacatctttcttggtgggtagggtgaaataaattctttgtagaagactgggggctggggggggggggaagggtttgcctgggtaataggaaatgcgcgttattgggagtggagactgttgtctggccaataatattcaataaacaccctacttctttcactgtgtttaacaagaaaagaatgaatccgtttattgattcttttcgaccatagaccaccatataattactggctgcaaatttcttgcccgttgagctttaagtttccactactacggtcttatatagtactactgtgtttctgttctctttacagtattgctgatattgtggaaagtatcgttgatgtgtatggtctctggcccgaaattagttcagcctggtacctctgctccattccgagccctcggaccaaactgggccactggaaaacagattatggtctctagagagacgacactaataggatctccgaggccttaaagcctagactattacaaaataggaatctcccgtcaatgcgtatattagcgcagatcattgtgtggagactaggttatggcactctaaagtggagctgggagtaaaatgggccaattaagcctagtgcttgctattcccagatgtggccgcaggtcctctgaggacgactgaagggtctctgaggtcggtatcctcttcgtgatgattctaaataattctaatgaagaaacttcagctagtttcgcggtctaattcatgagacctatgtctcctttctctgagtatgcgcttgaggtttaaggagcaacaaagctcccagggccggcttcttggagctaacggggcagtctctagggtcgacttcctttaaggatgaggatgaattaagaaatatcagaggtagtttcatacacaggccctatcgactttaggaacgtataggctagctctgggagtttcgctgctcctggaacctcaagcccttaaaactttctggtcctggtatgggcaaatttactcctaggagggtttgaaagctcctaggatcgcgggttagctcttaggggtgtaaagtctgtctctgggaatatgagccgcccctcctggaaactacattgatcctggaactctaggttaagttcctagaagccgctattggcaatcccaggattgacgaagatgcctgggatcagaattctttcaagtatggatgaagaaactttagcgtagtttcgtgtatggatccactcctttcttttacagcctcatagagtgcgggaacgtattggctagtcccgggaaccccactaccactggaaccttaagccgtccgtagaggttaataggggtctccgggtgactgaagtgcctctgggatcgcttagagtgtccctggtattgatgttagggatatacggagtatgtgagcttatatagcattagctctatcagccctaagaacgtgtaaattggccctaggagctttgtgctcctggcagatatatgtcctcccgggatcgagtggaatgtctctgggattggtatctacgagggtttctagtaaatatccgcgggttcatatgtctccttttcttgcagtcctatgagccctattttgatataagtaactgtcacgaggtatagatagctaggatatgctgtctattcggagcaatctaacttaagcttcgtacgttggggactgagctatagtaatgacgtcactcgaccttattggtggtgataagtggggctcggtgtagattcataactcctaagtcaaaatggactatatacccttaagaatgcaagggcttaatattgaataacgcgactgtacggtctaccatgtcggctagtcctataaggactgctctggtggagagtatatcaccgctaacgcagacccactcgaatacttctaattcggaacacgaccgttcggtgaagctgagcgttgaagtcggcatatctaaagacgaggcatataatccgttgtagctaggatacctgcctgggcttgaagcacaatatagttaatgcaccatggaaattttaaagcatatgataagctaattagctcaattttttttttgaggttgatagatggtgggaaagatgaggagatgggctgatctactagataagacgtatattcgttcagaatattatgtatacgtgctgatattctctcaatttctaaaataagtgcggtgtagaaggtgggtaaggataaggtattcgattacatttagctcttgtcccgcttgacatggaataaaggatctttttcgcgggaatcggcaatgaagaatgagggtatgaatattgaaatatgaggtatctaatgcgggggatataacccctcgagtatctatacaatttttaagtgatggtaatgaagctctttttttgataagtggtttatctctggcatttttgatatatttctgccggctgcttgattctactgagtatttggatggagggctaaagtacgtatatgtcggtgtgggccgtattgtaaaatgtagggtctaattaatggtgttcaactctctgtattgctgtatcgactttcctaacaatttatatgggccgtcaattactaatctaaaattacaaaatgtataggatcaatggatcctccggtatgccggtatgccaatgtatctattccgatagtatatttatgcctgaggcaccagttgactctgagtttagaggtgagtaagctggatccctctatgacagtcctttccccttgccgaacagtgggctgcctactctgttaacttcattcgattatctgttgaatacttcttttaacaatggaccgaggaaacaatcgctgaattacgatgtcagcttgaaaaataataaaggctccgagaagcagcagagcgcagctagagggagagagtacggcgactctaaccctaaagaagggacttgttgccctaagggaaagagtctgtacggttggtgatagttgcaatatgtcatgcctatcgagccaaaaagaaataggttaccacatccattgtatagatttcctatcgctcgctatgttcgtgccttcgcttgtgagattataagaatctataactatgttgcttagcctcctgctaacgacgatatgcttgcttctatttccgcgactgggatagtacgaggcttaagagcttattatgtaggaatgtatcttttaactcgttgatgtcgcagagagcactatatttaagggtgatcttttttctaatgtgtggttgaccatttaggaatccgtgtatcccgctctatattaataatcctgccgttgataagtcgaaagtttggagggatgtaagggagcttaatgattgtgctatccgtgttgccgtctgattgtatagagtctgtttgaggtctgttttctgggaggttgtagagtgagaagtttgtattaaaagttttgcgctttgtaggaaaagcttactataacagtctctgactggactaatttgcgacgcttttcccttctccgttggctttggattgcaatctggtagaggtcttttgaggctagatgtaggcttggtattttccggcttatatactgtaggttcagtcagcctataggagttggtagtatttgggatcgtttgctgtaggtcctcgtctattttctgctcgattttcggtccctaaaatgcctgtatgcagtttggtagaagtaatcggagtgagatagaagataagcactctatagggccgatttgttaaacagatatagacgagtatgtgggaaaagtatcggtatataggttttaaacttaggttggtgctattttgtttaaaccaggaggatataaaaggacctatttatactgtctaaggtgcctatcgatcgtaccttgtgattgaactaaagtaactaccagtacctctcgctggtggcgatgatatgcttgtcgcagtctgggtgcatagtcttcggaattgtctcgtataagtagtatggccgagatagccaactttctatattaagcaatatcgatctatctagacggggacatcgacatcgatgtccagtcctagggttccctcattctaagctgtatgtctatgggataaggcccagcctaagggtattaagtgtatgggtgtctgggtctaagataaggctgatcggcgaagctggggattggatggctatcaattgttcccggtaagaagctatatctggctgctgggtggtcatttaaacctacgttagcctggagcgtcaatcttttgagtactagggttgagtatggggatgatcggtgaagttgcggatttgaatggctatcaattacccttgagaaggtgctatgttagtggttttcgcgtaaaggcctatctagctgcctttagggcgtaaagcgaggctcgctggaatcaaaaatagtgactctcgttttattgaagggttctgtggaggctgtacacttgtggggaagacatcgaaatgtataattcagattgttgattgtcgataaagctaatactgaagaaagctatgtaatacggaagaactccaatatccttgctaatatatgttacctagggcagattgtataaggatgatatcctgtacgcgttccggcagggatatatggctcgagataggtggagcattgagccgcgaagcagctattctgatcgagaacgccctgtaatattagctgatttcggatgtataagcggacagtctttgtgcttacagaaaagaagggccgcttgatataccctggtctctgcttgataaatcactacgtcagtcattaagcctatgaaaaaataatagacgacctacttatatacgataagcttcagccctctaatgcgcggatcattctggatattacggataaccagcggattctgcaatatagcaggaatgaaacgactaaggggagtgagtgaccctcctcgaaactccaccctagtggtagtctcttcgtctcttgcgctttcgtcagataaataagttatggtgctagcggggtgagactcacagtggtatgccttcggtagagtattcttgccaataaatgaagaaagtacggcttaggttggccattgggacgccagataggttaaattctgggttaacatcgataattctaatgttgaagaatgaaagtgagggtattccggtaagcctgttttgtgttgagagattttgctaaattatagggctcgaggaagaggccttatggagtaaatgaaaatagagttgtttggggaaccataggtgcagagtgaggagaactatatattcaagctgtcagtggacgataggtctaggtaatgccgcgagatttagggtgattggaattaattctttctttcctcaaaatcattatgtacaatacccgctgacagaataggtcgttgattattttagtgcctcacgcgtgataaccggcgtttggattacgaattggtagagaggcttgaggatttagtattttccggctcatttatagtaggtttagtcagcctataggggccggcagcaattgaggtcgtttgctctaggtcctcatttattttccactcgattttcggtctaaacaaaaaaaattgcttgtgtgtgtagctttgtagaagcaatcgaagcgagatagatgacaagcactttatggagccaatttgtcaaatagattcaaatcatgtagacgagtatgtggtaatatcatcaatggagaggtttcgagcttaagctggtgcttctttatttaaaccaggaggctataaagggacatatttctactgtctaaggtggctatcaactgcgcctggtcattactaaagatctagccatggtgagtacccgcccctctctctggtgacgatggtatgcttatatcagaagcccgccccgattcctgtccaaatcctctatgggccggcaaaaattgctttggaggcaatgctcttcttgagaattgtatctctatcactcttggaatggaggccctcggaaaacctcagctaagatgctgaaatgttgctagatgcctgcaagactctgagaagcaggggatcctaggaaccctatctcgaaaatgacttacacctccacgtgggaaatatattacccgatctcagttatggtgctgttctaatgctagcgctgatgacttggtattttgatgctttatcttctaaagtatcgcagggcttgattgttttcttgagttggccttacgatagtgaagtgaagggaatactttaggatcgatattgaagtataatgtgcggaatggactcctcaaacttcgactttttgcttgtctggaattgagccctacctagtgatctgtgtaactggtaaatatgaaatgtattatatctgctttgcttagtagtaaccgagctttctgaaacggttataaatatcatcgagacattccttgtactagtcctttaaaatgttgtggatcttaaatccgagaaccttcccaagtttgtacctttttgtatattcctgcaggtatttggaatgaaggtgctggtaacaaagagctttctttgagttgagatcttccactggttgttgcaaaataatcggattatcgccgctcagaggaacgaactttgtaatcccatattttcctaagacccgtgaaatactaacctcaagtaccgtaagatccactaggaatgctttatgctgatcgccaagctcttgaagagcaatggcattaaaaaccatatcatcgagaccccttcttttgatgtcttccataagtgtgagtctattgggatgaaactaaattcgtacggtcttgtttggttagagcttgtgttaatgtggagaaagggtgacttatatgtaaacgaatcggtactgagtttttggcagaaagactagagtctttcgtagatttatgtatgttacttcgattgggatctgggcctctaaataaaagcgtttcgcgcgagttgcctggggaaaagaaaaaggaggatatgcagttcgaaaaaatataacgaactctaggtaggctcaagtagactatggtcttgcagtcgtgaaatcctggttaatgattcggataaacctgaggaacagtagtttatatcatgatgatctagcagacttgtcatttcttttgcatatgctactgattataggtctaggacagtggcttggggctctgaactacctggtacagcgaaataaccgtttagtctccaaaacgatctatggctggcgaagcgatccgtatgtgtataagtagaaactctactttaagatactctatgcctgaataggtttagatctgaggttagctccgttccctgaaatctaagcctttttaggataatccctgtactcctatttagataaataccagctccgctagccacttagatttcctttcctaaattgaaatgcatttaccggaagaccttagagaacagcttacatttgcccttggggctgtatcaccgatatatatcatttcctaggtatcaaatacttttaaatttacaaaaactgtttactactaagttaagaaaagggctgggatgggctatttaaggattttttctcaaggggaataaagaatgaattatagtagctgctcctaagagaatacctccttgtactaacgatatcgtccgcctcgcactcagctaactctggtccgagttcaagtcccgattgtacctttgctttcggcttagttgagaattctagtaaggccgcagcgagcgaagtggtacgcgatattgttctaataccaatgtcgaactccagccgcggcgtgaataatcctgtttgtactccttcggcctatgcttaaagacctatctcattttcgagtacctgtaactatacctccgtgtacgattttacgcctaagccgcgccccaggcctgagtcacccttacgggtttctaacaatgtgcttcgagctatctatgctatgtgtgaggctaaaaggcatgatactacctattatgattctatctggcttggactgcagaaaatttctgatgactaggatgttgaagaagttgcattgaatcgatatggccggatataagtactgtagtccaggaacgatgctaggggcgatatgttcaaatatgcccagcgtttcagccttttgcttggagcttaagaattgcaggttatagagaaaacactactaccggatgtgtgctctaggggtgtaaccctgagatctgctgcaattagcaaactggccgaatacctcctcgttgaaaaacgacgtatattagatgaaaacaagcggcgctctcattacgtttcagtatgtgagcttttcggccccggtgccctttttttgcttggagattctgatggagtactttctctgtaggttacctaatgaggaagagatagcccatttcctgttcttacggtttctagatgggaaagagacctgaatgctgaagatatggaatctttatacaaatatgtcatatgtcatcttaaaaattggatggctgactgtaagaagttgaacgaaaaggccgtgaccttagtgattgaaggactccgtgcttgtgggtgggatggacgcttgtaccgtgataccacatttatgaaatgcttggctggttatgtgaatctggaatctttactctccgtggcgactagatatgatgaagcactactaagaaaaaggaaatatcccgataaagaggtatcatcgaaacgctatcatcaggatatataccatgatcctatcttagatgaggagtatccgatatctctacgagtcgagttaaataaccgttctggtgattagtttggggaatcgcaatcgcaatcacctggaacaaattttggcacaacgcttgactgggactgcagtatcaacttgagcttggattgggaccagtttattgatgactagattacagaaagtatgaatgtatgattcgctggggattcgactggaggcatgagggccattttataatcggggatttcttaggtttaatcatcagaacccattggaaaagacaagaccaggaaaatccccccgccaccaggggaatggaaatacaccagatctcccctccaggccacggcgtctcccgcttcaaggtccaatgctaccttccttccaaggcgcgatctatgttggtgagacccttcgtagaatgtaaaccaccgatttgacggcgatagcctcgtaattgcgatggtgacgtatattctcggtccagctgtcatcagcttagttgggtcggcatctgtttcgtggaacatcccaagattcagggtctgcggtgaggaaggagtttggtttggataaaatagcggagcgactaaatctttgtccatattctgatcggtcagcgagtgctagcatggaaaaggagtgagtgatagataccctgaggaattcatccttgatttcgaacccagtctgaggtactttatactcgttgtatttgtcctttgtggcagttggtacattgtggatgagtccattttggaaatcatcggcgagttttgatgcgactgatgctgatactgcctgcctcagcacgacataaccgttcgaattggccatcgttctggatcgaccatgagagttggttttaaagacctaataaaaccaaatagccttcattagagataaaacagaaacttatgtattgtcatattaccttatagtatcgtcaaagtcgctcttgggggatttcgccataaccttagcactgaaaccccgcgatcaggaacttcatgcccaattctctgcttacaaagaactcggcggcggggtacaaagatactaagatcacgtggataaaacgtctcgaaatcttgagacaagttaaagcggtacccgtgcagaatctatgggcatctgaaaggaataaacagtagaagaagaaagaccaggctgtgcacacacaaattccgtcccacaatgttggcaggtaaatctcaagaggccacaaggactttcattttgggcatggctggcgaaaccggcttctctaacctcaaacggctaataagcagtaaagtatttaatcacttttaaaacaattaatcactactaaaacaattattcaactcgtctgctatattacatattcattgcacgcacgccgactatcgcgtatccgttccgctctgaagcgatgagtaagacctttccggagtcgccgcagctagccgcatacatgggcctgttgtatggatatgaggactctgaaccctcagaaaggcccaaccatcggtcggttttggctaagccttctatctcattgatccttgtcgtcgcctactgtcagccttagctgtacttaaaccactatttttgacatagtcagaagtgtagcaagcatgaatctgtttctgatttgataggcgctagaacatattcgatctaccagcatgatgacttattgtctctttggcatcgtgcgctttcgttgtctctaaaacaagacgttctattcttttcctggcagcagtaccgtactgtaaatgaaatcgtgtggtacgataactttgcggtgatattacaggcgacacgcggttcagaacatccatgtttagctctacatgattgggcgaagaggcaccagatctaaagatcgtactgtgagaccgaataataagggaaagcacccggaaacggagaatcaaaagagtttgtattcatcaatgtgtgtgtccataatacagtagctgttactcagatggtctctaggcagacggcaccaacaggctttccgaggcctaaaagctcaaactagtacaaaataggaatagaggctgatcggggtttccctgtcaatgcacattagggcaaatcgttgtatagagactaggttatggaactccaaagtggagcaagtctagtactagccattctcattagttggcaagagccaagaaactaatcagctagcaatattcaagagacgatcaaattcaaggagactcgtacgaaaatagaaaataaaaataaaggagannnnnnnnnnnnnnnnnnnnnnnnnnnnnnnnnnnnnnnnnnnnnnnnnnnnnnnnnnnnnnnnnnnnnnnnnnnnnnnnnnnnnnnnnnnnnnnnnnnnnnnnnnnnnnnnnnnnnnnnnnnnnnnnnnnnnnnnnnnnnnnnnnnnnnnnnnnnnnnnnnnnnnnnnnnnnnnnnnnnnnnnnnnnnnnnnnnnnnnnnnnnnnnnngacttgtacgaaaatagaaaataaaaataaaggagaattagcagcagtttcgtaatgggcgtctcgccgtgaaatgcaacctgcgcacaaaaatttcatttgtacaccaatcagcgtcaaacgtgcattttggcgcgcggtaccttctatgcacgtagacacatgcaacaccaacttggcatattgacgagaatggtctgagccatgatgaagtccttgatgtttctgctcaacatataaagagacttgtacgagcgtaacagcccactcatcagacctcaatagctttttcagttaccacaacatttcaaaactctttaaatatgtctttcagtgtttacacggccgaatatcttggtgcacctaaccatgaagccatttacattgaaaccaatcccaccgccccccgaatgtctgaaagaggacgtctctatcatgtcactggaaatttactccagggtatgagatacgacccaagaggttcctttgaccctgaactctcggcgtcttatgttccaggcacgaagaaaattattggatccattgcacacacagatttgtccagatttgagacggagtgttgcagagcagtcgaggcgcctcgagcccagttgacgcttgggggtaaacagttgtatcctggtacaccactttatcgttgtggagactggttgcgagacgttcagaaattggcatttgaaaagggcatcttaaagcggtagaatgaggtaagtcaatcaagtccatttatcaaggtacaacctctgacggactggatccgaaagcaagcgcacaggtacttcagagcccttgtaaaagatgttctttctacagctggacgtatttcccaacatatcccgactctgggtcaccagcgcaattttgttctttcctcgtgttctcccatcgaatctatgattctcactatatgagcgggagattcacagtgagattagtttgaacgatctcttctctccggttggggtgttgaaaagaggccgagaggttggtttcgcgtacaagaaacgtaaaatgcagagtctatggctttccttttgacgactaagaccaatgttttatattttcccaatgtaccatcagtagaagaccgacgagtagacaacttgcatcattaggtattcaaccgggtactgatcaaatatatccgggataagctcaagccagtccggtttcatttgacaatacaaggttgaattgcaaaaatcccaaaattcggggtaccagcctgacaaattccagtcgatcagagtaactttgaagtctgcgtctccattgttgcaaaccccttttcgctccacaattatgttcttcggttgcagatctccatgagtaaagacaattcgatggttcttgagagtgcggttgaccatttctttcaacaatcgaatgtagtgtggagactgcatttggcccagtctctccagtattccttggttcatctgcttctggtccttgaatggcccggaaatgattgggttgttatcaggggttgaaagaacaccgtcgatgtaaggcgtgccattcaagttcccaaagtagccaggtgatggtattgctcgcagttcattgatcgcctgtctgatcctctggctgatcgtcgtcttctcagttggggtgagcgatggcagtaatttctgcaagtctgtaccagggacgaaatccataacgacatatcttttctgggtctctgggtcgatgaagttggcgtgaacctttggcacaggaaccttgctgttggctgcaacaaatttcacgttctcagcttccaaaggcgggatcgaatacccgattttgaccgcgaagcgttccttcactcgaaccactttgatggcatttgttcgtatactaaggacatcggtcgatgttgattcatctgcttctggtccttgaatggcccggaaatgactgggttgttatcaggggttgaaagaacaccgtcggtgtaaggcgtgcaattcaagttcccaaagtggccaggtgatggtattgttcgcaattcattgaccgcctgtctgatcctctggctgatcgtcgtcttctcggttggggtgagcgatggcagtaatttttgcaagtctgtaccagggacgaaatccataacgacatatcttttctgggtctctgggtcgatgaagttggcgtgaacctttggtacaggaaccttgctgttggctgcaacaaatttcatgttctcagcttccaaaggcgggatcgaatacccgattttgaccgcgaagcgttccttcactcgaaccactttgatggcatttgttcgtatactaaggacatcggtcgatgcctcaatgtcggcaatagttggtagttcaatgatcgattgaagctcgttatccatctcggtgaacaaaaatgatgccgccgaagtgcaacaaaggatttcacgggctttatgtattgttcgacaagagcaaacagtgcaaacataacaccgtcataacacgtgatgaattccagtcggccattggtttatcacgggaaaagaaagggcttgccgcgagtatgacaagcacgaccagcgttaggcccaaatttgccagcatcagctgatactgttatggactttgactgacgtgctgtaccctgcataggccccagcgagttggatttcaggtcacgtgacgtatatagatctgttggggtggagtgaaaaatgtataagtcgtgcaacagaactattgtggatcctcacgaaaggatcagataacttgaatggacagagtgatctgagaagactaggcagtctgagtggacagagtagtctagtgttactcccccaattttgttttaagcggtacttcgtgcgtgattccccacctcgctcccaaccactccttgaaaagtaattgtattgatttgatgatatccctcaactacccccttggccgccacaaatatatggtagaagtgtgcctgtcagtaggcgacgactacaactaccgagtactttgttaaccagttagttagttaatgcaaaggaggcctggcaacaacgcgaccttagtatctgagaaggtctatcagagggtatgccacgtagggtgctggctattactgaatcttattgacggtacactgaatattagtcatttgaataattactataatttttgtgcggtagaataatggcgggaaatggcggtgactgagagggttaacagacatggtgctgcctactttggtctagtggcaccctcagcgagagaaagagatacgctaaccgcattttgaccatctccaaaacacattggaataccaggtacgtgagccagggcaatgacgtcgctcgaccttacaggtggggatcagtgggactaggtggagattcgggactgccaataaaataaaccatatgccctcaagaatgcaagggcttcaaattggaccgactggttcggattactactggttcggcgaagctgagcgttgaagtcggcatctcaaaagatgaggcatacaatctgttgtacataagacacctgcctaaggctttaattaagcattggtgaacggtagtcaacggcggggacgagatagtcaacgcatcaaagaaatgttgagggatatgatgagacgatagttagctcaatttttttgagcttgatgaggagacggaccgcactttattggcattatggaaatttcagaacgtttacacagtgggtaaagacaaggcggttatatttatctggcatcccacttgatgcggaataaaggatcgttttcgtggaagttgggcagtggagaactaaaaaaaaaagaggcacccaatgcggctggtataatccatggggtctctaccacgcaaacttcaattgaacaccagactaccgagaagctatattccttagcaaattgcgctctttctcatgttgaacattcgcttcttgtacgtaacaattctctcccttcggttggcttccgcggataacaccatttttagttgagttctaccgtgcaagaggaacgacaaaacagtaacttgtcagccctagacatacatgctctcaacatgactctcctcactgaattccttagagaactcttcactcaattccgcagccatttccaggtatttgtagcttactggttcttcacccactgtggcaagagcatgcgcaattgacgtgaggtttttgatctgattatggtcagcgggttcataaactatatggctcgcgaaagcttctggaactttcgactagcagactaaccacgtattgcactccctatgcttgctcctagaatagcaacctaaggccaatagagaacgctagatgacgcagcttttctggcatttacaatgacctatagggaggacactagtgaacatcagtaaaagcagcaataagcgcagttacttgtttgccatacagaacttgaacagaagacttgcgcctttatgcattgcctctttagctgttaacgatttacctaaacgaggctggctcaccctagcttccctatggtagtcgcccgcgggagaaaatcgacactggcatccaggtcaagaagcgatgaaggtgctcgaaacacactgagtgaggtgttgccaatttcggtctagtggcactctcaacaagagtaagagatacgctaaccatatccggccacttacgccgacagggctgttaatcggcagccagtagggttactgagtaatctggagcttctccaagatggagcaagtagaagtcaggaaccaatcacacattggctcctctgatccattgttactcccccacttttgttttaaccgattttgacggcccagattctccatggcgccctatcaatactgaacagcccacgctttcttatgtatatcgagtccaacccgtgcttgactatgatattactctcggcttatcctactccgatggttttggctacagggaaatcaaaacaaaaaaacctcaatttccccggttgctaattcgtgaaatctagtcactaaccgagcatttcaatgtagctaccacagaagggcaaggtctaaccgatttccaagcgcctgtactgtctcatcctcttcctctcattttcatttagttttctggtatatgaagggtatgccaatggacagatttgaaaggaacgaagactgaggtctcaactcctgacgctgacgttggctcctcgatccagtagcatgtgcaccaccttttcatggcctccgtccgctgcggcctggagtgcatttccatagcgtccaccctgggcgttgacatcggcacctcgatccaacagcatctgcaccaccttctcatgcccttcctgtgatgcggcgaggagtgcactgccatagaattgggcctccagtggtgcattgccatattcatcaaactgggcattgacgttggcggctcgaacaagcagaatcttgactacctcttcatggcctccaactgatgcggcctggagtgcattgccatgttcatcaaacttggcattgacgtcggcaccacgatccagcagcatctccacaactttctcatggcccccggctgatgcggcctggagtgcattgtcatataacttaccctgggcgttgacttcggctcctcgatccagcagcatacgcaccacattttcatggcctccatgtgatgccgcctggagtgcatacccatatgttccaccctgggcgttgacatgagcgcctcgattcagcaccatacgcaccaccttctcatggcctccctgtgatgcggcctgaagtgcattaccgtaccgccctccttgagcattcactgtatccgatgaatcggcatccctagtgtcaatcaggaagatactgctcaggacggattccaatcccagcaacgctgcatagtatagaggcagtgctatattggcaaagggacggttataatccacattcatattccacggacgatccatgtcatgcaaccgtatccaggttacgaaagccttcatgtcgtctttgaaaagctttgacagtaatttttcgattgctgtcttcccttcttctgagtttgcataatgatgaaaccaatgtatggctgcgaaatgagcaaaagggaactcggtgagctttgcctcatctaacagtccctcagagagagctggctccaggaggtagaccaggcatatctgagctatttccgtattcgcaggcgcacttcgtatagcaaatatacgtgagttttgttgtaagatgcgatccgacaggagatactcctggactgagaaatgcgctatgcgaacagtcacagtggtctgcctattgtagtcttccgtggctgcggtctcgataagtccgaggcaaatgtcgacaaggtcatcttgctcatacgaacgaccttgacgatcaagccgcggtagctcactgagatcaactgcgtgtgcgtcgatgagctcattagccgtgagcggtcgggtggagaagcaaagtagagtcaaaacccgccgcacgtcctcgacatattcttcgtcgatgttgcacaagattcgctcgtatgtctcatcgagatcgcggggcaatgttcttagacatttgtcaagctggatctggttgcggacccgacttatggctttgaactgacactcgacatatctgaacctagaaacggttttagtcaaaacggtgggaagcatgtctccttattgtgcttacactccttgtgcacttgttgtcaattttgcctcaatctcattgtggcgcgctttccacctctggagtttctcgtcgttcttgagctgataagagacaaagtttgctatgtctctgtcgacttccgaattcctaagcgaaagatcttggtcgcgagaaggatgtaacgattcgcggatatctagctcgttgcgacttgtcaccaaaagatggaccccaggtatacaccaactgcgtatcatttgtatcgctcttaagacgccttcccttttggtgtctcgtgggctctcgtctagcgcgtcgagtagaatataagtatcgcagaatcgttcaaggaagcgtcgaagtgagtcaagcagcgcatgcgctgggggtgatccggatctgtgcaatgcatgcagctgttctagatctctctcgccatcttgtagctgtaccgatagctgcaacagcaacgtgcgtaacatgccgttgtcgtcttgcttcgcctcgtcgttaaaggaaaagtagaaaaatgcgattccgactccatgtttatgtctcgtctcatgaaatgtatgctggattgcgcttgaacagaggaccgacttgccacatcctgcgaaaccattcagccataggaaggaattacactcctctagccaagtccgaaagtaatggccgttgacgaaccatagacctgtgcttggatgacatttcgcgcacgtagcgttgtgattgagagatgcatctggcgccataagccagcagcgaatcgtgagtgaaacttgactagcatttgttcgctcgacaagagatttgacttccgatatgccatcctggatctcgctatggctttttagctgtaggacatcgagtgcgaatgacaggttttcacgtatgtcgctgacgtcttcttcgagtttctgtaaggtacttttccgaaacggataggccgcgcgacgtccagcaactttgacacgatactttaaatcggcggccgagtctttgtggaatttctcacattcgctctgtagctcggtgatgatttcctcgcatttctgtaccgccttctggacttctcggagtagatcttgcgtgtcggccttcgatcggcgttcctctacagcaatatcgaggcctcggaaaatgcccagaagattgtcgagattctgcgtaacctttgccagatccgtgtcttggcccttgtatgtagtgtaaaaactgaccaaagactgggtgacttgaataccaagcgaaagtagtccggcaacccctgatgcgatagcgagcggatcagccattgtgattgataatattccttgagacgggggatataaccatctaaatatgtgagatagccattatctcagagccaagcttcagcctcatcgagcaggggctcagctgctttgatgcccaaagcggggctgagcatgggcgatgataagaatagaatcgaatgagagttgtatcagtatttccaggaacttaggggatttgttatcatgtgattgcgtgttacaacagattacggaattttagaaaggaactaaatcaaagatagactagcgtatatcctcgctttgtgcaagccggcgactggtgcaggagatattgttctttttgaggagcagtgcgaaaaatttcaaatggttaaaagagccaatgtgtgattggttcctgactactccttgctcattgcggagctacatgcaaaagcgtagcgcgtgattttctttcttgtgaactaaggcaggtctagattctggtggactcgcatagacaatggtaagtaccatctcactaagtgcccatcctgtggtcgaagggataactctctagtgacgtaagagatgtgcaatggggtcatcacggagaaccacgtgattgtcacactaaagtacaagttgagccaatcagctatatcggtggaatgaaaattgccagtggtttgtctgcactaacttagttttgggccaagaccaggcgaatgtgcgccaccatcccatagcacctaccattgtcttcccgcctcttgtaggggaaccttgtcgcatgggcacagttttaaatgtggaggaacccattctacatgagtttcataccctccctcaaagcctattatcagtttgccagatcgtcatgcctcaacacttggcactgtatcgctctaccatcattccgaagatggatacagaattagtccataaaatttttgcacgagacgaagccgaatctgctccgccctgttttacgggaaatgaatacgatggccggatgggactgaggatttcgtctatatttgtgatattggttggttcgattttcggcgccgtcttccccgtcgttgcaaggcgatttggtggttcaggaatcccatcctggacatttttcgttgccaaatacttcgggtctggtgtcattattgctaccgccttcattcacctccttggcccagctgaggaggctttaagaaacagttgtttgaccggtgctatcacagaatacagctgggttgaaggtataatcctaatgactatcgttgtcatgttcttcgtggagctgatggtcatgcgatacgcacggtttggccaaaacgatcagcgcgatgttgagaatcacatacattcacacttagacgacgatgaggatgccactactgatgagagaaatcgagtggtgccgagatatgataacttggaccgaccctggcggcatcaggatactgaaatgtccgaaaaaaccggtatggaagggtacatggctcagctgacttctatcttcatcttggaattcggtatcgtctttcactctgtgtttatcggtttgactctcgccgtatctggcgaagagttcacaacctctacattgtcatcgtcttccaccagacttttgaagggctaggtttgggctctcgccttgctacccttccttggccgcaatcaaaactcctgacaccgtatattctggggctcgtttatggagtttccactcctattgctattgccattggcttgggtgtgcgtaaaacttatccaccaaccggtcgaacaacgctgatcgttaatggtgttttcgactcgatatctggaggaatcctcatttacgttggtcttgtcgagcttatggcgcacgagttcatgttcaccccttctatgcgaagagctccgattcaaacggttctggcagcacttcttttgctctccagcggtgcggcgctcatggcattgcttggcaagtgggcgtaggtcgcgttcgatcctgtttattaacattttccggccttgactttgacgaaatgcaaactttcaaaagattctctgccgatcctgtttcccccagaacctggtgcgacccctcaagtagttggcagttgcgacgtcgcaacaccagggctcgtcgcaggagacccatgattactgtattgcgtcccatgagaagatgagctgtgttaatcatgttacgtggttcctttgataagggttatgtgcatggtgggatgtatgacgtgtgtccgcagcctggtccctcttcttttactgttcctctaagagtctcatggattatgcacggtaccgctttaagttgtcaagtcaaaggtctttccacgcgagaccaacctgaaatagtcaaaaatgaatggcataaggctcggactgaccttgccatgtctggctggtataagctggagactacgttacggcacttcaaagtggagctgggagtaaaaatgggccaatcaagtctctaggatcgactagagtccccagggctagtatgtgtacagcaaaaagagacatggaccacctcagtttggaaaaatgaggaaatactgatcccaaagacacttctgttgatcctggaatggccagtggttgctctaggagctttacgtagggttccaggagcaatatagctcccaggagaggtgatctatagacgaacttaacactcctgggaagctgacccccgatcctgggagctttcaaatcctcctaggtgtaaactcgtccatccccggacagaaagcttttgagggactctaataaagcttccgcgtgcctgggagccatgccatggatcctggggtcgaatatgatcccaggaacgtgaggggtctcacgacctaaaatgtgggctccggaatgggtaatcaatattaggaatacaaattgaaatacgggcaataagtgtgggcaactgaaagaagaggtggttaacccgttcttggggaccgagccagagcaatgacgtcaccgaaccttatcggtggcgatccgtggggctcggtgggactcaggaaccaaattagcctatatgccctcaagaatgcaagggcttaatattgaacaacacgaccgcatggtctactatgtcagctagccatatagggacggctctggtagagggtatatcaccgctaacgccggccaactcgaacactactaattcggaatataaccagttcgtgttgaagtcggcttgtcaaaagatgaggcatacaatccgttgtagctaggttacttggctgggctttaattaagcattagtgagtggtacttaacgatggaacgacatagccaatggatcgggggaatttttgaggcatatgataagaagctatttagctcaaactttttgaggttgatggatcttggggaagatgaagaaatggttgatccactagataagacatatctccgttcagaacattatacatacgtgctgatattcctcaattccaaagaaaagtgcggtctagagagtgggtaagaatacgggacaaaggatctttttcgctggaatcagcaacgaagaataagggcgtatatattgaaatataaggcatctaatgcagtgtatctacacaagcttcaagtgatggtaatgaagctcctttttttggatgtgagtggttatctcttcggcatttttgatatatttctgcgggctccctgattctactagtacactttgccatcaacctgctcaaaactgctgatactgtcagagaccaccaggaccaagcaaggcttgtccctataaatacctcgtagacgttggccctccaagtattttttatctaatgatcattgcaggtcgtgtcagcgaacgagtgtggtcgaagctggtcgtccaaagaaggagctctgatcgtgtcgaatttcgccattcctggccacgcgtaggtgagcgaaaggccatcaagcacagacatagtgttcttgcaacagaaatcttcagtagctgagaataatattcatcttctgggttgacttcgctgttgggatcacagaaaaagtaataaagcgtgctaggtgtatcacgggaacatggagtaggacacgggcaatcccattagtcacataggaatactcgagtccttctggatcatcacgcgatattcctggacaagagtggagcagacaagacgctccgcattgtacctcagcttcgcttcctggtctgtcgggattttgtcaaccagagataggagatccaaaacgtcttcgtgtgacgtgaggcagtgtgcttattttattggattagcaatacaattatgcatgataatgaagcatgaagcatttccggcccgcatccgcatgaatcagtcagaatttctatctattataattcttgatgcccgcttctccaacgcacctatatggcctctggtgatatacgattctatatgcattgacaaccacgaattgatcatccaattctggctctcgaacttgacttttgtgtgatgccatgaatcacatgaaaaccttaattcaactatgaagcttcaggaccgatattatggactgtcgtgtactaaccgaaaatattgcgataagcgcccaaccgctcgacaacctcgaggaacgagattgtccacatgactttcccaggtatgctattagacatacattccatcagcaggcctctctctgccaaactcctttgaaaatttctcatttgatttggcggctaacttcaagtattcgtaattcacctggttgacgtcagcctcagcgagagcgtgtgcaattgctgcgacgtttttgatctggttcatgattggtcagcaattgagatgttcagtgccactcggacacccacctctcgtccattcagagctaaagactccaatcgtcgaagttcgtgctcctcaacaatggcaggtccttgcatcgtacatgccttggacagaaaagttgaccagagatctctgcgaaactctctcgttaaattctcatactcaatgatcaagtgaatccggctgagaattgcgtcatcaaactggataccccgattggaagtcaagaaaagaattccttgataatattccagctttcggaggaaaatggtcacaaggcgattgtgggcatcgtggtaagatgtacgctgctccatgaacgcgtctgcctcatccaagagaagcacggcattaaagtgtttggcgatcttgaatactgtttcaagttgttgctcaagcgcattggaatccccgtggttgacaacaagttcgcctgcagatatctggaaaaatcagtgacgccaaaatcagccgagctggatggttcatacagaatagagggggagtttgaaatactccgaggttgcctcaaccgtgaaagtctttccgacacccggtgggccactaggacaagttaggttgggaagtcttgattcatagacgctttgccgacatacttcagaagaatgttgaatccttggccctttccatcaattacgtcgtcgaacggtaccgtcggtatcatccctaggcgggttttcgccaatgacaggaggatggtcttggtctctgaagggatcttcaggcaatcgaacgattcgggtgaccaatgcacgtccctaagagcactaactgcgcactccactggaatcacattagccggacaccaaaccatcgtcagtcgtgtcacatacagaacattttctccttgaaactgaaacagcaaactgttgggcaggcaaccagtaaatcggcctctctcagcttttgtgcatccacaccgtctcctcgcattttctccttctctcgctcacggccctccatgagcattgcaccaatgtcaaagactgcaattccatccttatccttgaccccaatgtcgcggagtgacggtcgggagtagtttggctgcatttcatggaaaaatgcggcgtccactgccactcgactcttgatgttgactttgatagccttccccttgttcataaagaatgcactgcctttacagtgccgaacgtgtgagccggctaaatcccgaaacttttgacccctctcgatcaggtctttccggacttgtttgtgattttgatagtgatggagagggaaggcctcaagagtctcgatcggctttgacccccgaaactttgcaacacgcagaaagattccggcttcgccaaacttgattccgtcataatcaaggaatcggcactccagattccaccacatctcatcattctgtgtgacctcttcccccgcgtcgaatacgacacatcgcggctcttttgtgccaatgcatctggtataaacatggcaaccaggcttgaaaagcgcccaaagaaggtcatatgtaatatgaccgtgctgcaacattgattcgagacgctgcgagatagccgcatatgcttgcttgaggtggtcgatgagcaaacagagatgctgtgccgctgtcgatctatggtccgaactgttgtccatgttctccgcgcgtctgtcgagctctgggaggaaatggaaaaggaaattttgctcgatctaaatctacgtcagcgtgctccttgatgataatactgtctcaattaccgatggcttgtcctccatcaggctaacggccttgatgtcgtgcagcacgtctcgcacgatgtcgcgtaggccttccgacttgatgtctatgaatggcactacctccttggacgtccggtctgatcatactattagtaggtcttcggtccggcatgcaaaggtgtcacgtaccaacacgttcacggacaacaaatgcatattcagcatagtcatccaggtcattgctagtctccgttggctcggcaatcttgtatttacatgcctcttcgtcccagctagacccgtgtcagctatctgaaaaagtggaaagggtggttggctggtggctcatacgtttccacaattgttttggattgggattttgatgcccatttctcaaaagacttgaaatcctccggtgtagtacggatcggattttcgagatcaatcccatctgccgcctgggcgttctctgcctgctcatcgctggaaaagcaaggccgagaaggctcagaaggctcatttgccacgggaggctcagctgaagaatatcctttgcggatgaccttcactaacaactgcttcagttgatccatatctgggcctggttgggaatggtcctggaagacaggagtgtttggaggttctcggttggtaagactgagcagcacactttcaaagagatgcttcagatcctccacggtatctcgaggcgtggtcgattccttcgttgggctatccggcggcgtcatgccttggtgacagggagacgaagtctttttcgatgccatgtgctctgaaagcaatcttgggctgctttgaacaggtgccatgctgtttgatggaatttgtttgtacgatggagaagaaagattgaatcaacacggtaaaagctgatatgaatgtaaacgaagaactcaataaggccgagaggttcctcccattttatatcttcgttgcccacccctgccccatgtgaaaccctttaacaactttaacaaaagtacgccgcagatcgcatgaacttggatgaacggtcttgaagggattgagttgcttgtgggagcaagcctatctctgccgtcccagacgggacggctaaggtggataggcacaaagaatctgcacgtctagtttcgagaatgcatgccttcaagactatgacgtaagaaagagatgcgaaatatcgtcgaataatcagcgatatttcgacgaaatttcgatgaatttatgcagtttaatcttatctcggatagagatttcagagggagtaaataattttacagagacttgggaaattattccaaggattctaatttattgttcttattatgttgatcttgaagagaagaaggcgaaaacttttggtctttaagctcaaagattattgtcattgttgcttgatcaggtcttgacaggagaccagcgcccaacccttcgggcaaagacctttgtcacgtgataatataaaggcggatttcttcctgcccctcacctgcccactcatctatttaccagcaatgcgctgcttgactcaaaggtgatacagccccaaatgacagtggtcattaatccttgacggaaaattcgtgttacttgaaaggaaatagctcaaaagcaacgtcgttggtgattatccttaatatcatcggactaagcggcgacgtaagtcaagcacgttcacttctcatctggcgtacgtgtaatgtattctaatatacaaaagcattcattctccccgggaagtttggattccaccagaaaagcgcacacagagaccagtaccatggataaggcagccaaaaaagttcgcaccgaaagctcatcagacagcgggattctcgaagaatgcaagaaagaagtgagaatgatatgttagatgttcatctgtgagaagaatactaattaccccaggtaacatgtgacttatgcgatcgaataaactggacgactccatcaaaaggtgttcagactacccctccaccgagaacggttgcaattgtcgtggatgttgttcagaacagaggcgctatacggattttccagaaagaaagcggtgaatacgttgacggagttggaaccgaggaggaaggctttcggatcatcattccatggagagacacttggcgcttcagagcatcgggcgtcgttgaagttgggtatataatagcaaaggatgcagattagtttggcggctggttccatgttgccaatggacggtgtaagattaatcgatccgtcagctcgttactgactggaattgtaacaaaagatgtcgtgttcactccatacgtgtcagtgagccatactgcgcctgatatctgaccagattctatgatatctcgaatatcttgcaagttgagctcatagacatctccggtcaaagggtctttaggtcgatttagctagttatcatccacttcgtgccaaggacatacctatgtcttgctgcttcccgggctgaaatgtcgacaaatccggcgatgtgactactgcaggtggtccttcgccatgttagctagtagcatgacccacaagatttaggtgttatactgaagatcggctgaacgatttggtagcttccttgaccccgctcctgatgctcgagagcgtcgtgagtctcggagacttgatggactgttccatcaccggcttgtaagggagcctggggagcttctgggtagagagcaaaactgaaatactgacgtgcaagccatcggagtacagggttgtcaaggtcagagtgattttggatctcatatggaagatcaagccgtatactctcctttgcgatggaaattgtcgaaagtcccaagccaatagcacaaagaacgaccatcgatgggccgttcagctgtcgaaccttgcggaggaagtcgagataagtcgactgtcggcctgctccgatggagtcctggggtgggtacccattcctcagtaatgtggcggctgccttgattcttttcctttctttttctttcacgccgttccgacgctcaacatatcttgaagcctggacaagcttctctaaggcactactaagagacagagtcatgcttcagaacaatgcaagtggagttttcgtcgaaaaggagcgaagagcgagtcgatgaaaagcgctaaataccacaaatcaatgtagcaaactcgagctttcgatgtcaaaaatcagtcgaaaatcagtcgaaaaggagacgaaaaggagacgaaagaccgctcttttaatagccttccccagtaaagtgggttgcagggctgtgctcttgtggatcgatgggacactagcgagtgcgtgcagctctcaccactcaggacacatacaacgccgtactcgtcattggttgatgctctttgctctgtcagcctagacacgctgaggcccgaaaaagtggggcagtcgtccaatttctggcttgagtgaaaagatcacagtaccttagtccaccaatcccacacgtgctaggaatacctcatctttcggctacgttagaaaaataggatggcgcgaggtgccacaattggatctcttctcccaccgacgtagccgctggtctagattgtgggtcaggcgccgagaaaaggctggccctgagacgcccatccgctaatgcatagtggtcacctcaaagcactggagcctctttcactaccctcagccaatcacggcatctgttgataggtgccgcagaagaaggtgctatgagcgactgagccattgtacaggggacacggtattcacatctcgtaggcagggatccccgctcgacctgtgcaaattcgtcctgggatgttcgtgatctaaggtataaatatcgcaggcaatagcgcaagggaagaagagcaccataaagagaggtcgagcagaacaagacagggcgggacaggacggaacggaacgtggtaaggtaacatgactctgcatcaccagcctcattggctaaaacccgctgagtgactatcatttttgtacaatcttcagatatctcccaaccagcgtagccgctgactgggtccagcgcccagcggccgccgctcgctcaccttgggggcgcaggacgcttcctctagagactccttataagtggcttgctaacatgtcacaggatcacgctaatgcatgggcggtcacttcatgctctggaacctcttgaattttgttgcggatctatctatctccagcttatcacacccaattcatgatatgcgccgccaagtcaggctcgagacactgaacatcgtgccgcacaaggatcatctcaagacatggtattcatgcatctgatacaagttcccccgcatctgaaaggaaaagtaaaagaaagaaagaccagcctgtggacacacatattccatcccacaacgttggcaagtaaatcttaaaagccacgaggactttaattttgggcatggctggctaaacctgcatctccaacttcaaacggctaataaacagtaaagtatctaatctattttggtttctctccattatttacgtctatgttgaaaatggcgcattggcgctctccaaaacaaaacccaaatgggcatggttttgattcgcggacgcccgtgcagaaacagcatgtaactaacaatgtggctcgaaaaaaaccttgctgccacgtcagtatagtttgattggatgggggctgccaggcaagtcacccttggtagttgagccttgcataatagcagcggcctcagacctgcacgcgcatctgatttgttaagcttaagcgccctactaaatcccttcagccccatttcttttgtagctggccgctgacttgtgatgtgatagctgcataaagaggtttatttcggaagattctctcacgtttataaaagctggctcctcgacagctttggtgaatcttactcccaactgcttttctcagcgaccacttgaactagccaacgtttcgtcaattctattcaacagagctgttgcaacaatttactatcgtgaataacaacacaaagcttcagtcgcaaggtaaatactcttccctgttctgtgagaaaacacctgttgacagcaaccagcaccatcaaccacatgccgaacaagtggaacaaaatcaaggacgccgtccttaaacatgcaaatggttacaaaaagctagtgcgaccaagtgttggtctccacaaaaccgctttcccgaagactgcggcagatctcgagagtctaggagtgcgcttcgacttcgcaggcactattgaggaaaatgggaagaaattccacagattccaggttcaggtaaattcgggtaacaagatcccaacttcctggaagcagtggagacaaaaacacgaaaaagggacacacggaatcgttgcaactgtcaaaatccccgacgatggcactaaggaagatgtccaggcggctcttgacgctgtcgatagtgagatcgactagatagactcccccttctcagaggcctaagacatgtcgagttcgcgcatcccggtgatgaggccacttttgtatctaatctgtgctcagtcagcatccgaggccatttacctcaggatctacccatagcacttacagtggtgttccatgagtatttgaccttgggtacttcgggccccgtcactttagacaacctactatgtttaaatacgaagttgggcattaccagctattaaaattggattgaatttccgtttctgcgaggcaatatttgaagtgggcctaagaaatggaccctagaccgaagtacccaagttcaaatactgtatctgtcgctttgcgattggccgaatgggaagaatcctaacatttaccgacagggtcacgtttgtgctgagtaatacgcatgttagccagaattcggctacgtaaccttggaagtaccctagtgcaaataataatagcagcttgggagcaatcttggaactgacaaccatctgcttgaagatgcgacgcttttcgagattttttattccatactcgaagtcgttacccaggaggatgtcctctatgcgtggtaagcctgatctgttcgagtacacttctgggcgctttttgtgagtcgtgacggcggttagctgttgaacgcgtcaattgcgataaactgacttgatgcgtcaaatagatttaacgaagagctccgccgcgctgaacgccgtattcaattcgacgtggatgctcttgcaagggcggcctgccgttctgtcggtcgacatgtcaaggacgtggcctcgatcacaaaactcgcggaggggggcttcaaccgtgtcttgcaagtcaccttcgatgacggatatgcagttcttgcaagactaccgtacaagacgactgtcccgaaacatcatgcagtggccagtgaggctgctacactcgcacttctgcgtgctcatggggtcccagtcccaaaagtcctcgcgtattctccagatcagacaaacgccgttggaaccgaatatattctacttgaaaggctcgaaggatcacccttgagtgaccagtggttctccatggataccaaaactcgggtcaaagtaatgagacagattgttgatttggagagacgattcatgagcatccacttcccagcaagcggaagtctttatcaccgccgtgatctcgacggctcacaacactttatcccagtctcggacgatatcgtcgttggcccaactgcacagcatgaatggtggtatcgagaacgggcctctctaaaggttgaccgcggcccatgtaagtattcatccaggagtgcgtgttttctttggggatattgactctgagccagggaataccttttctgcatgcttcgaagcacccgccaagcgcgagatagaattctgtgaaagatttggcaaaccacgcctacacgtcgagagatacctacgagaaatacaccagttccaaaagctctcacctattccgtaccaacgtcttcttaccaattatttagagttagcgccctacctcgacgtcccatccggccaccgcatgtctcgcccgactcttcgccatccggacttttcacccaacaatatcctaatgaatacgtccaacgacgtggtagggatcattgactggcagcacgcagtcattctacccctctgtctgtgcgctggaatccccgatcattttcaaaattggggcgatccattgtccgagacattatctaagccagaggtcaaattgccagaaaattttgatagactcagcaatgaagaacaaggaactgttcaagagacgatgcggagacggattgtccatttctattatgctgcgttgaccatgaaatccctgccggatcattttgacgccatcagaaccgaaaactgtatgctccgagcgaagctttttcatcatgtacaggctccctgggaaggggactctgtctcgttgaagtatgccatgttacaggtcctcaagaattggcctatgtcgctggatggaggagcacaaacgagatctgttgagtgtccaattcaattttctggggaagagatgcagaaatgttcggaggatcatcgccaagaacaagagaaactacaggaactgggcgagatgagagatctaatcgggacagatgccctaggctgggtttcagacgaggatgagtttgaacggtgcaggggtatcatccagagcatcaaagacggtttgatggaacattcaagcactgagatggagaaaattgcggtcctttcccatttccctttcgatgaccacgaagaaacagaaatgttcggaggatcatcgccaagaacaagagaaactacaggaactgggcgagatgagagatctaatcgggacagatgccctaggctgggtttcagacgaggatgagtttgaacggtgcaggggtatcatccagagcatcaaagacggtttgatggaacattcaagcactgagatggagaaaattgcggtcctttcccattttcctttcgatgaccacgaagaaaatgcgtgataacttcagatctcgatcttggtagataatatttattcatatatagcttacggacatctgaagatagcttgtcccgaatttgagcaacagatgatcttccacggcgattcgctcgtagttctcgagaccttgttctctactaatcgggaccccaatacctttgatggctacctctttgtggatcccacgactggggcctgcaatataagcagcacggtcacacccaccgaaaagtggctgccatttgccatcggagcctcgacatgccctggacgtcttgctgaaacaagaattacccaggtcatgttcgccaagatcctatacggcttcgacgcaaacttggagggcgtcgatgcgcaattatttctacattacgacgggacttgtggggctacagtgatctttgcttgaatagaggtatcgacaaaaaaatcgattaactattgtttctgctactcaggcattatttaatatgtggattgggagtgacggtgcgtaagtcaaggcgcagtggccggtggggcgagagtgaaatcaagggggcagctttgagtgcgaagtagatcggacggagagagcgaagaaaaggaaaagaggtgggagaggcaaggtcggctcttttatgttggagcaaagttgagaggtcatgtacgtgacagtatggcagtcgatagtggcaaaactaaccggatagtgttattcgtgaattacaggtccgtcgtttacaagactcacattatagccgaaaacagtgtcgccaatagcaaaaagtgagattaaaactgtgtttcagtgccagagcggcttagcgactctgcagggagaccattgccgctcttcgaaactgtgaaacctggtaaggtttaactgttgcccaacgcactacgggcgctggacccagcgtgacggtcttgtttttggcgatccgtttgactgatattcgacaaagactaataactactgccaactcaaacaggggaatagcggtccaccgtttgcctgcgccgaggtggaccgtatcgcggtcttgacacaccttcttcggtgcctttgctcttgccacccgcggcttgaactgcctcgcaaggtgcgcctctatatgaagattcgctcctcacgttggaactccgccgagaatgcccagaatttccagccttgtggcccttgaggcgtgtgcaatagcgcacctggagggagccttccgaccttccaggaaaatactctgcgattcgcttccatggcaggctccgctcttccttcaattcaatcaaaagctggtcatccttagacaggaatcgggttggccctgtcgttttcccagcgcgggaccccttctgggaggtttgcttggaatgctggctgccaattttgtttttatattgtgatgtagctctgcctgatctctgagagcaggaatgctctgcctgctcttcaaaggtaactgaatagatgacccttgacaaaagtatctgtcgcgtaaggaaacctcggataggaatcgtttcgatatcgtgcaagcttgttagggaagtatgatctgcggccactttggattgaactgcctcgtcgaccgagaggcgtttagtgttctgccggggaggtctagtattgagctgcatggtaggttgtcttgctctttttagccgacgggaaggaacgctgcttccatgtgcatcttcaccactttcgcccacgtagtccgcatcgtcggggccatcaggatcgtcgctgctgtcatcggatatatactcatcccggtcccgctttctgttcggagaggccattcgtgttattgaggcagagtccttcattgttcgctcttggggacggaagttggagatgacgacggacggctggtctaacactggggcatgatctaacactggacagaatcctgtaccttccactgttgggctgcatggcgactgcttcccactgtcttgaaatgcgggtgaggttgaacgcgccaatgttccattttgacgaggttttggagacgctgacaggctctccgcatcacgacgctgtagctcgccttcgttgtcatgagctgcagccctgtctttctcctggccaataaccacatggctttcggaaacgggctgtctgttgtacttctcggctggcatgcttttcccgatgacgcaagctgccagtttcgatcctgattcgtctgcttcaattccagcatctccagacagcaaatgcgttggagtggattgattttcttggcccgcagggtcaataatttggccattgaccattgtattgccgtctgctatatctattgtcgggttcgaaggtcgcaaaatgtctccttccatcgtggattcgtctgcattctaccacgtgagccagaggacagggcaacctagctgactgagagcactgacctgcattttcatatgcttctgcttggcttagaatttcttcctccgccatggggatgcagaggccatcacggaccgatgtagagtatagaggagtggattgctcaagacctcccccctggataatatcttgagaagaagatgtcacgttgttctcatggtgcccgtcaccttggaagtctgggtctcaaagtgcgaagtcagccctctattgtcgaccactttggcattaaggaaaaagagataggcacaatgaattcaacagagtgaattgaagaaattaaggggactcaaaatgacggccaccacgtaccatcgtgacgctgatcgtataaaccttgccctaaaccactgctggaaacatcatccggcaattctcgactcgccgtgtgtatatttgatacagcaacgtttgcatctcttcccgaagaggcattcaagaaatccatgtcaaactcattcgagcagtcaatggtcacttcttccgcaagctcgttgggggctaataacgtctcgtcttcactagatgcatggaaatgactttggaagtacggcgcatgccccgagaatggaacactcgaacgccagtgctggctgggtagaaacggataggctggcgggggtctatccgaaggtatctgtgaattgatacgatcgtgggacccgggtgcccggagcggattgatcggtgccatgccgcgagaaagattcagacgcaatgtatgagaatagaagagaaggaaccataaacagatagccagcctccttctcggtcccagtgaggagttccaacaaccctttatacttgcctaccgtcccctgcctcttccgagcgctttgggcaggtcgaatggacaagagtcatgagacaaagcgcagcctgccgatacgaggacccaccaacccatccgcaatggaattcacaaaggagtcacgcgcaaggccgacactgcatgcggcatttctcccattggatcaaagcgtttcatgctcggataagttcacggtctgccctactgcgcctcgccagaagaggatcatggcgaagggatcgtctccgaagggctgcttgcgtgggcatcagcgtccagtcgggtgagacatcatgcgcacggcggtgccgaccctctcaggaacttccgatagtccaggggcctcgatcccctttgctgtgcctcgccggaacagtacaattgcggcaagatcgtccacggaagatcacttggcgcagacactggcgcccagtcaaatgataatccatcatctgtaaagtaacgctggcatgttcaaggccaccaaaagtcgaagccctcacgaaaagaatcggggaatgagacattcttcgtcataggctctagacggtggataggtggggcgtaagagcagcaaatgccaatggatgcatatgtgtggcgagaactcgtgatcagcactagatcagagagcgccacgtcacaatcgtgctcgactgaccagccggtcgatcgaatctcctcgcaagtcaaggttcccttcccgggccagtcgtagatggctacgacgctacagcgggcaaaacaaacacataccagtgaaacagggaccagagggtaggcatgttggctgccgcccaagtgaggtcacagggttgcagtgcagtggtacaatctgagcatcagggcgaccaggagaccgatgaatggatccatctacagccagtcgagtggagaaagggcgcgcaggcgattacgaggaactcagctgaaacatggaggcgcaggggggagtatgccgtgcgatccggaattacggtatcatttcaccgctgggtatgacgggagagagaagagtgcagtcagtcaaagagcggaggacggtggagcgacgcactggaagttatatagtccaaaaggtgaagctggcaggcggtcggagatggcagatccccgtttagggatagccggggccgccaaactgcttcgggaactgctaaaccaaatcagagtccactaaaccagaacaggagcgggttgtgcctttgccatttcaggaaaagcgtagacgccaaaccaaagtgggatagaccaaacccaaacgggggcagtggaggcagacgccaaacccgatccaggggggcgccgaatccggccgcgtcggcacatatggtatttgtaccttatagactcctagggtttagggtagagtagtatcttacctataagggcttccttagcctccttttatatcataagtatatatagggagctattagtatcttctatacctaatcctatagctagataggtaacttcttatagttcctctactctttagtagatagcttctttaagcttatatataaaccttacctagtgctatttattatatatagaggtttatatatagtctagcctcctacttagtatatcggctaggtttgtagagctagttctaaatataatagtgaagttaaaacttactatatacttagcctatcttacttatctgtaaggtagctccttcgttattataaagttcgttaagtttatataatctatcttaactaagacctagtatatatttcctttaaggaaatgtctctattcttagaaagcttctataattactagtatctcttggtttcctactctatagtaggtttcttccagccttatcttatataagaagaatataattggtttctaaataccgctctctttttatagctataagtagattactctaattacttcgcctaatatattagattctactaaggttcttagtagggggtcgaagtatataaggagaggggctttttaaaaaatctccttaatctcttagaaagccttctttatagctttattaaagtagaagcctagcttctttttattcttccctttcttctatatatctaggccctagactaatatattgagcggccctataatctttaagtataatttaataaacctatagtaaaagtttgcgaaacctataaattactatatatcgaagatatactctagttccggctaagtagtaatcgcttctacttagataaggtctatagagatactattgctaaagataataaatctaaggaactctacctaagaagtatagaaggtatacttcgaggcctttatatagagtttaaactagtagagccgttctaatactatttatatatattctacgtaggattccttatcctaagagaagattaggatattatctaggtagactactaagaagatatctagtaatcctataagagccttatttatataagcttagaaggttataggtatatttgtaagcctaaacggtattatataatactcgaaatatctatagtaggttctaaataccgttttttatttattacccttcttaatatagatcctatagtatatatctctaaggtctagcttagtatagacctttatactagtgagtctcgatagggattcgctaattaaaggtagggggtagcggttcttaatagtaattatatttaatctatagaagtctatatatagccgaagtttactatctttctttagtataaaaagaataggtacccctatagggctctttgaatattagatctagcccctcttaaggttcttgttaatataggtatatatagacatcggcaaagcccagcatgggcccaagatttcggcccacggcccaacccatatgggctatgggcctagctcccctaggcctagcccagcccatagcccagtaggctaagcccataagcccactagtagcccatttaggcctatttttatataaataataggtcttagtgtatataaaaatgcttacttagtagaatagtatactattacttacatgtgttttagtttcttaattgaaagacagccttttatgtcctagtagccttgaaattttagtttttatttatgaaataatttttaatatggccggtcacttattatttctagaaagaataaaaaaataaggccggtttagtgatactttatagataggctggtctctatatagaaatatatattatagtatagctagtaatgtaggtatactaggtatattatagtgaattataatacctatgcgaccgaatcctttgacctaaatactgattctagaaagaataaaaaaataaggctggtttagtaatactttatagataggctagtctctatatagaaatatatattatagtatagctagtaatataggtatactaggtatattatagtgaattataatacctatataaccgaatcctttaacctaaatactaattaaagactattaggagaattaagagatatctaatcctataatataatttaaaaatagtacctaaaagaagaggggggccttataaggctaagaaggtatcttaatcctattaagtatataccttttaaaattaaacttcttttatttttttctattcttaatagtatatattttagatttagagtatattctttactctataaagctacctactaattttaaagggctaatatatatttctttatatatcctattctatagttagctatagtatatagtctaatctatatactaaatatagttattttaggataaaagggtatataggcgctgctatagagaatataaattatatttaaaattctttaggctacagcctacttataatcaattctagaaaatataaactaatacagagactagtatataggctaatacagagactagtatataggctaatatagagactagtatatagactctattatcgatagaggaggtactctatatactacggcagagggagggggctgaggcctataggctagtagttaaggttcttaagagcctggttaagaggaaagagttaactaagtattagatttatatatttctagattatatcactgagtaggagctatagaaaggataggaagactacgctaatttttaataacagtagattagtgtaattaaggttcagcagtatattcaaaagaattaggagtatatcgataaagtacactaaaaggcgactgcgctatagggtatacgagacactaaggccttctttagatacattatattaaagtcaacagctaagctagctagcaaattgatcacagtaaaaatgaactaccaggatataaggcttactattaataacgaggttacctaacgcgtttcttcctctaggagtagggtccagaagaattgtaagtatattaagctgatcgatatatagtaggcctattctaggctatacagtaagtcgataatcctactctgtataaaggatctccgagattatggtctttagcttaatactaataggttctgttatacagctaggagtagaagggatcttaaagaggttagcgatatatcgatcggtaggggtagtagctagtagccagttctactactaccgctaagtaccctaagattcgatataagtaaggcttaataaagagaaggagggggtaggtaggataggcccctagctattctactaagtaataatactatagctatcctactaagtaataatactgtggcagtagtaacgataagccagcctactaataggacatatagctaccgcgtagcagagataataatagataagtatacaataattgcgaaagatagtatatagaaagagagggaggccctagttacctttataaaaattgtgaaactagtcgaaagaaggttcggtaccagttacatctatttcaaatacactaaagggattatcgatatactaggtatacgaagcggtggtaagagcccttaggagctagtagagcgaatctaactcagttactacaatcttagtcaataggataagtttcggaagaagttctctatctagtttatactaggcgcagatcccagaaacctaaaggaaatacatagtgtctactaattcaatccgaaacccatacccccggtagtcgtatcatttaatactatatactagcttttatttaagagtatttatagaagggttatacctagataccaatttcagcctaatattatctatacctaaataactatagatagcagtatagtactactatagctacttaggtagctaaaagaggactttaatagtgcctaccctagtggaattctatcactaatctactaagaattcgatatatataagcactatttcagtgagcgttatgggcgccgccttagctagctacggagtatatagtatagcctagtatagtaactaatctaataagacctagtgtactatacctattatatattctttcggctggactactaatagaaattaattgtatttctatactatataaagagtacgctacctagtaagagaatatcattctaatatattgatattaatattagggagtttatcgctactagtaagggcagtaatatcctatagggattagtctcccttaataacgaagataacggtaattatactattattctactaggaatataatactacattgcttcttagtagaacaatctacaaacctatatagaggacccagaaaacctatctagccgaaagccatttaaggtccctaatagctttatctataggattaccctaaagatatggtaactagaggatgtggcttagtaccgaataaactggaaaaagtaagtctataaggtaggtaacgtctacctatcccttcctacccttccttacagcttaataggactagtaactagatagaggaagactgtcttactatagtttataggtattagggataattacttaatactcgatatacctaagtctgggtcctaggaggaggtattagctgtatatagagaccttcttaacgctactaggataccctctagactaataagtcggtaatatatatatatcctatatacctttcccgctactacctacttctatactacctctactattttagaatgcctagtagggcggtctaagtagataatactagctgctataaaggaccttaatatactctttaggcctaataaggccgctgcagtaatatatatttagaattagaggcgagaggcatagctagagtacactcgcctatttaagttgaccgttaaggctgaaaaggatgcctataggaaggacttattcttttagagacataagaggcgccttcttaatagtagtgataccagcagtggtaatactaatagtagtaatactaatagtagtaatactactaatagcggtaatactactgatagcggtaatactgctaatagcggtaatactaatagtggtgatactgatggcggtgatactgatagtagtaatagtgatagtagcgataattggcctaacgacaacgtcggcgtcgatattaagataggcgaaggggagggggagggcagtaaggctgatagagaatttaaggaggttaataattgaggctgtattagcaaatttcaatgggtactagatatatcttttttttatagataaatacaactataataatttcttttataataatacttctaccttgccgctactactcccagtttnnnnnnnnnnnnnnnnnnnnnnnnnnnnnnnnnnnnnnnnnnnnnnnnnnnnnnnnnnnnnnnnnnnnnnnnnnnnnnnnnnnnnnnnnnnnnnnnnnnnnnnnnnnnnnnnnnnnnnnnnnnnnnnnnnnnnnnnnnnnnnnnnnnnnnnnnnnnnnnnnnnnnnnnnnnnnnnnnnnnnnnnnnnnnnnnnnnnnnnnnnnnnnnnnnnnnnnnnnnnnnnnnnnnnnnnnnnnnnnnnnnnnnnnnnnnnnnnnnnnnnnnnnnnnnnnnnnnnnnnnnnnnnnnnnnnnnnnnnnnnnnnnnnnnnnnnnnnnnnnnnnnnnnnnnnnnnnnnnnnnnnnnnnnnnnnnnnnnnnnnnnnnnnnnnnnnnnnnnnnnnnnnnnnnnnnnnnnnnnnnnnnnnnnnnnnnnnnnnnnnnnnnnnnnnnnnnnnnnnnnnnnnnnnnnnnnnnnnnnnnnnnnnnnnnnnnnnnnnnnnnnnnnnnnnnnnnnnnnnnnnnnnnnnnnnnnnnnnnnnnnnnnnnnnnnnnnnnnnnnnnnnnnnnnnnnnnnnnnnnnnnnnnnnnnnnnnnnnnnnnnnnnnnnnnnnnnnnnnnnnnnnnnnnnnnnnnnnnnnnnnnnnnnnnnnnnnnnnnnnnnnnnnnnnnnnnnnnnnnnnnnnnnnnnnnnnnnnnnnnnnnnnnnnnnnnnnnnnnnnnnnnnnnnnnnnnnnnnnnnnnnnnnnnnnnnnnnnnnnnnnnnnnnnnnnnnnnnnnnnnnnnnnnnnnnnnnnnnnnnnnnnnnnnnnnnnnnnnnnnnnnnnnnnnnnnnnnnnnnnnnnnnnnnnnnnnnnnnnnnnnnnnnnnnnnnnnnnnnnnnnnnnnnnnnnnnnnnnnnnnnnnnnnnnnnnnaaatttattttttgtttttcggggaaaaaacctcttagcctaaaaagtagtttactttcatacttctgcttcgctactactacttaaagtttttcgcccaaaaaactagttactggttttttaggcgaaaaactcttaacctaaaaagtagtatatatattcttatgatttctattaggcccctagctagtaagacccgcgtagataagtttttttcttagatcgtgggtccctcagcctttttaggattcttagcctatattatgtagcctacgcgtctctatctaaattaggctaagtaaccagctaatagggtaactagttaatcttcaatcttccttatctagttacaatagaattagtcttttattatatatacctatccttcctatttatatatactctatatcgccccccttactgctctatccccttataccgcccccctactttctaccgccatactaggtaccatgtcccaaagtacctaatctaataggaatatagatataacctatagtataggctatatcccctcctctctctagacctcttaggcagagtcctcttatgccctgtcctcctttagcctactacctagtagataagctaggccctttaacactgagcccaatcgccctataatccctagagaccccctatcctgctttacccacgttagccctaaccagagaaaggactacgtcctatatgataaaatagcaaataagatataggttgaatagtagctataaatagactatagatagaaaggtagtatccgctaggatataaatcacagctcccctatatagtaagacttctactaggttacctatagcagagataggataccgaaggtttagtgcaagttctgccacagtattttagaatacccgaactttctgagtaatagaaagggctataacggcttattaactatattaaggtacctaaagacataggcctaccttagggcccaaaacacaataagagtaggaagaggaattagccaattttttctaaaagaagtatatttttaactatctaatccttagctattactaatatatctgggtcgataggaccgtataccccctaaggcctaatattcagaggctgcctaggataaggccctactctgatttattactatagatcgactacccttctcccttattaagagtaagtcctttcggtatctcttctaaatggcctacgtagcactatccctcccctagataccttctactataataatatattagcgcctatgcgattatatttaagagagcgtaagcttagtacttaggacactacctaaggatacaaaaatcttaattatattagactgctagacgtccctatataactagggatttatagtaattaccggctactttatcaatagtagctaggtatatcgcaaggttctacttaggtttaagccactttaccaggtatatactagaaagtatcttagtactatccttcttaaaaccctggctaagtataagattatagaccaggtattcagaatcacaactaataatacttctaataatataatactagttaaagctacctagatagggctcctaagcggtatataggtattccgaataccctaccttacctatattatctagctctctcttaactagctcctagattgcctataggctatactaaaaaataatattattaagttagtttagactgataagaattcaaagaatataaaagaaaatggtaattatcagaaataagcaatctcgaagatactaaaaaagatctataatcttaccctctatatctatattagcctaaagcactaggctaccttcctctaactataagaagggaaggggccgcatattattctaatctaggatatagtaacccggtggaactcaacctttttaatactttactagataaagagaatatacctattctttatatccttctgtactaattataattataaggagatacttcctagtgatttagaatggtattaaattgactaccttctacaaatcacccggcctttctatgactatataacagaactcttaaagataaaggaagtgactacctaccttacctttaagatttataatgccctctttaattacttcgactaggtagaggtactactaaaacagaagtgtgctctgtggaagttagaaatactaagtacacttattattagccacgaaaagctgagtgagtactatatataaacgaccggttgtaaaggagacctctttactattaggataatactggcccctgatagttaactttaattcttctggttggatggctactaggagcctaagtagtatgataaatatcggaaatccttcctagatatattagcgccttatcgagaacgccttactttaggctaggggtcagctaatatactagctataataccagctagctctaggctacgtaagttactaaagagtaggtagaagtctataagaccagctgttaataaggtaacctagtaccttaatagtagtatactataccttagtctcccctactattttactatactatactaactactctctacctttagaccttattaatactaagcctctgcagttctagtaagagaataaaactcgttttcctataattgtataacttacccgcgatatcctcttaatactagtaactagggctagtattaagcgactctttaatactgtataggatatttactattatcgctgcggttgcctaaagtctgagacaattaaggagcttatactataccgctatataactaagttcagtattaaggatactaagataaaggaattgtagcagttacttagtctagtagaggctgaggttaagaataaggagagtactgactttctagaggatagtaagtgtaatctaattagtgataataaggaggaggagggaggggaaggcgatagggcgtaggaggcatctccttcctccttaaccagtagggataggggcagtaatagcgatagtgagatagagggggtttagctagatttgccagagcctactactctatttcgtgtatcttagaggaagcgtaagagtagggtcgacgatgattatatatattattagaatatattaatggtactgtcttcttaatttttactcccttctttgaattttcctggtattccggctgtaactaggatacataataatacgggtcggaaatatattagttatgtatccatgcgctagaggcctatttgtattatataaggcctatatgggcccctattatgggctataggcctaggatatcagcctataatttagtgtaggccgaagaagtcagcctaaagcccagcctattggtaggctgggctgggctgggctatgggccgggtaggctttgccgatgtctaggtatataggacttctaactctatgttcgatagtaagtatagtgacctaaacgggggtacctttcctagctctaggtcgatagtataattgtatataatatattctagtaggattgaagctagagccttattaaagatatctacaaagtctctatatacttgcggtaaagggttgtctatctatatagctcctaaccgttcgccttcttctaatagatctagtggtctaatataaagtatataaaagatactatatagatacagttctttcttaaactcttctggggagactatctctatttctagcggggtacccttatagtataactaacggctagcgctctagtcgatatctagatttactatatagagctagtctatccctaggactatattatatcccgatatatcgatagccttatagtatatctttataatactatatcttctagtactatctataagctagagagcaatctcttagctactatataagtagattttatgcctatcaattgcctttactagatagggtatcccttttatatcttctagattctccttcgcctatctttagctaataaaggtctaggtagccttactattaattagaattctagtaacccctatcggggcgcccttataaatatctaagataaatatattatatactaatatactttagcccttctgctaaccctccttaagggttattcctagtaccgctatagcctatagtatagggttatctatttttttagctcctttaagttattcttctagaactacttagcttttaggtaaaccctcgcgatatatctagcttccttatataagtaatataagtcccttacctagttatctaattttaccccctagcctcgcttcctcttattagaggataatgactagccttatttcctcttattagaggataataactactccttttagctatcctataaggtagatagttcctagccttagtctaataacttcttactattatcctttaagtctatattcctattctacctatataggtatcgcttaacctatagctttatagtatataaaggtatttagctctctataaagctaagataggctacctaattattatagatctttattttaggtaggtcctactattaggcttcggtttagatctctcttaaaatacctatctctaggcagtcgatatatacctaatctaatagtatagagtgtaagtggttatagatccctattaggtattaggtatattaatatatactctattccagcttctatatagcttactattaatcggcttttactttatactataactatactaggtctataacttaggttaaggcctaagtttcgaatatatcctatataatctactttataggattattctttcggtattatatctaaccctaggtaaccttattcgagaggaattccgttacctgtataacccttactttatctaaggcgaactatcgtaggtatctcgcctaaaatacttcttattttaccttaaatatatcctacttatctatagttttactatagaatactggtatattagataggcttcgcggctccctaacttaggagattttactgctttatactatacctacattattatcgcggtcccctactaccgttaggggaggttagggtatcgccggtatccttaatatagggtttaggggttctggtacctaggcaatatctcccttaagtagtggtaggcgtagtatactcgattcctcctctaaggtaatggccgcgaggttccggtcgcgaaggtatagtaagagttcggctttctagtcagtaattataagccgttttttaagggccttaaggtctcgctattcggctataagccttctttcgttttctccgatatcctcgtcggaggattctatcggttaggcggccccctcttctacaggagcggctctttcagtaggtatggcccctatctcagtaggggtttgtaaatcctgcgtttagttttcttggccggtaggtaggggtatgtctccctgtaatacccggcttctactataggtatttcgaggtatcttataggttccagcggtccaattcgtgaaataaagcgattagaatattaggactagctaccagcgtatcctgaaaatagaggttcgaattagagtggaggtccccagcgtgggtcatataattcagtagactaatcgctaaggttctaaatctcatgtgcgcggtgtgtgtatacccctggcgcttacttagcaagtacgtcggcctatacgggccagttgtgcaagtgaccctcggggtcgtaacatttaccttgtgaggccatcatggttcgggcaggtgcgattatggcaagaaagaccttgatgtctgcggtcatgttgagtgcagggaactgcgaacccgcgatgtatctgaagttggataaacagagacacctttttttctagatatatttctacatgtttatatctcaagattcgccaatttggcccagaactaaaatgtatgactcaagtgaaataaatggtcagatttctgttcatcaaaacccagaccatctgatctgcaccgcagagactccaattctgcattgctcgaggccaatttggcatatcatgcagcatatagcacagatgagagcctgcctattcaaagacacaagcaaatcgaaaggaccatatccggagcaattcatgttctttgggagtctcccctgacagcttccattcgcgccaatatgccacacaatgatataccgggctttgacagaactgatagttgctgcgaagacaggcggtctcgagatgtttgataccctacatgctgctggagcagatgagtctaatggtgcagaaatcatcgttgggtgatgagcaggtccaaattcaatgagcggactactcagtatccgctctctctacctctttgcctgttcatggagccatcgaggctggcaatcaacctatgatacagtatccccgaactatcctcctcacacggctacaacctttagtcgcctaccgctatcgtatgccatcgcccgttacgattcaaccaatgctagcgtgtaacggtatctagtagatttaccatcttaccgtcagcttaaccctaatctgcgcacgccatcttctatatatacatcataatctagatcttctttcctggctggtaactttcatcccggtagggttggtggtgcaggaacaacggctctaggatataaactaccttgcgttgcttcgctgcctctcactggcaatcaaattgtagcttacgatccagttattgcaaatagtatatactacccttgaatctagatggcttccccgtggaatgccaagtccgctaaatatacaaaactagagggtaagggcctaagaaaactgtagtcactgacggaatcccagcaacagacgcaaaatgcgactatttggcttttattgcaatggtgagtaatgataccagagcaaatgatatagacggtaatactgctttgaattatggctaggactggtaacgtcagtgagtattgggatggctcgacaaatagattgagcgaggaagcctggcagaatgcgacaaactgctatgggtagtatagaaaagccaggtttcacagcaaatcaggtgagctttatatcctaggcagtagcacccaattaggaaatactctccgcgataagtccttatcgctttccaaggttctccttaggcactaaactacaaacagaaatgacgtttctgccactcccggccgcccggggaaacgagaatctcaggtgtcaagtccagattgagagcgtcatccactcaatctactttattccgcgagtccctatatgatttgaccctcccagaaacccctcaattcaaatcctagacattgaaaaacacccccattccaatatccctccagcctcgagctccgggacgcaatggcacccccgcgccagcgcaccacagctatcgtggatgactcgaggtccgaagcctcgagtggtacgagagaataccgcaaagccaccaagtcccgcagaccagctgcggcaaaagagaaagcctcggtcaccagcgcgcccgtcgtggaacaccagaacaccgaagaacagccccgagtatgtttcattctgaaagcaacgatcaatcgcaactctacacaaagcacagcgaagagaccataacctaatcccccttttacctctacagctcccctggacagatctacctctcgaaatgctccactcctaccgccacgtccataaactccccacaccctccgccttttcgagcgactactcccgcatgatcctctcgcaaggcgtcggccttcgctcgccaaccaccctcgctgcccgccgcgctcaatccttatcccaaaaccactcccaccgaaccaacacctcgtcggactccgtctccgactccacactgcgtcgcaccgccggccaggaccgcgtgagcaaagaccagttcgcgcttgttgtccggaagcacttcaacagcgctggtctctcggagcaggaaaccattgcgcggtttctgtacactgtgcgtgaggacaggagagggaggcagttccgattgcggtttcagccgtaaggtgaggagtctagctttggtctcttgctcttctcgtttctttcccctttctcgcaggggaaatgggattatacagggctttggacagagctagggctcttctgcttcttatcccaccgttctggtgctagcctgtcctggttgatggtgcgcttggttcggtgcggtgaacatacatggcgtgtgtggcttattgggctgccttgctttgagaatctggcggccttttctcttttgatatattaagatacccattggcgttccgtgtgtttatcttgttctatctctacttcttggtttgcgggttgcggactattccttccactatgtaactatactttacttgacttatacttttgcctataggaattctacgtcattaaatcggcgcagaaaatactactcgaggaagagtagcgacagcttcaagcgttaaatgacttactagtaagcgatagcgagatccttccacagctctgcaataaacaagtatcagtaatatgggaccgcaaacgagcagtttagcctctttgtaacggtgttgtttcagccttggaagcgagcgatctttaagcctactctatcgataagcctgagccttgattgagtctccagatggtatgagtaggaataatgatatttgatcttctgctagctatttgcgctatctcctaaggattagctagcgttagagaaggcctatactgctggtgagcattcgttgaatttggtgacgggggccaacggtgcacggctgttgacacatccaacgtattcgataacttcgcatatgactatgtattcccctagttagtctgattcgtacatctacttcgatatcgatctgtgaggggttcgtcatataaacataggcagatggatttccttatagtttgggagccccctcgagactggcaagaattagtcttagcatatcatcaatacattgtgttccttccacaaagtcctctgtatcttacccggttgacaggccttacacctgcataacgtatacctttacaatagagtgctataaagaagatatagctagttacttcgagggatagttcgcttactaagagagacctaaaaacgatataactaactaaagggattttcgtaattgagacagaggcacttgtccgatatctatactatcaatattttagcttaatgtcatgaaatctttattccttcgcgatagctccgccaaggcgtagtatgctttatttaggtcggcttataaggccatatattaccgatagctatagaactactagataagactaggagtcttattgaaggcttctagagttataggggaggttgcattataggagcgccagagtccgcctacgccacagaaggtaggtaagcctgacgctgctaagattccagctctaagcagagtaacgatacgtttgcagcctcctaaatattccgtaaatgattgaaggtcagcggccggtataatgctcttttcggataaagccatggtcttcaagtcataatatggacgttgaagagctgagcttatcaagggcgaagatgaaagtagggatacggggaatttataacttactgaatgaggcctgatctgtaagacatcgaaaatatgtcggctcaaccgtttctgtacaacataggtccaatcaatggagtactggctcagctagcaatttatagagcctgattacatgaattaaaataaacaatagttacacattattaggattaatagatcctccggtatgctgtgcattttacagtcgcgaaaccgtattaaatggtcggtgtattgaaaatggagtgccaagattgacctataccaattaggttagactgctgtgccaacggtcattgcagtcattacccagtcattacccatcgactcgactataccgttgcccgcaaaatggcatctgctcgcagcctcgatcagccgccgtccaccgcgactgaatgtccagcgaatgctacatcgacactatcaccctgcccgtctgcatctaccccgcccaccgagatatcgaccccgcgtgacgaaatgcccgaagttaacgacgatatcttgggaggactggaagacgtggtcgttctagattttaaggggcctcagtccctaaagaaacaaatcgactcccgacagaaggaactgcaggctagtcgctcctgccagcagttcatcgtgtgccggaacgttaggaaggagcaattgactagcatggatcagcgacgaagcctcggtagaggcattcgaaagtcctataattcaaacttacaaattctcgtgctcaagatgctgactacaattcacgaagccgctcacttgaccctatggcagattatttggaggcagcttatcgcgatgggggatggagagttgatagcaccatgcgggggggggaccttcctaagccaaagcaaaatatcgtctaaggaagccgatacagcgtataaaccagtgaagcgaaaccaggggtctgactggcctactatcgtcctcgagtgtggatactccgagtcgatgcgtcgcctcgcagtcgacgcacggtggtggctggtcaacgccggcggcgacgtgaagacagtcctcctcatctcaataaatggggagagacaggccctccacctcgaaagatggtgccttgctccgccttacgaccggcccgtaacccgcaacaccccgagtatggtcccgacgaagacgggcgaggtagatattgttgcaggtaatcccaggccatactcacgtactatatctgtagtaccgtactaatcattgcaatcataggtattgtgacaggggcgccgctatgcctgaagtttgaggaccttgtggagcggccacccggcccaacggagagggacgttgtcctaactgctgatcagttggccacatgggccaacttcctgtggaccacttatcagtaactaccatctcggtcggctgagcagcagtcaggctagtactaccctagcgtcttatgcctctctcctcgaatctctcgcgcaaaggggtcccagacgttgccaaccagacacgacctagtttcggtctttcttgaagcagttccttgaatttgtaacggtacccagaagctccaatcatttcactaggcgctgaagccattctattaatagtacagcggaacatgttatcttgtattctcagaagtcttgacattaagtctagcagaattgagaggatgttatacttaacaaacataaactaatacgatacgtatagcacctaggagagaaagcaagaaacgatgaatctcaatgataaagcagagcactgtctctgctatatagttcattggtattagcttaatacagacaagaaataaggccccggtactatgtgttttacatttgggcgacagacgttcgttgtttaatttaccatctttacttcaattcaatttctatctcctttatagaagtcttagggcggacgcgccgtgttctccaatttattcgcgcgtataataattgaatttacacacgcttctaccattttagtattatctagcagggtgatctagctaactattgcttcttcttgctcagcatttaatactgaattatgaaggtggcgcgtcgaacgagaaggccgcccatttaaccgggcgataggagatggtaaggaataccaaattcacgcgccaatggcgcgatttttagtttttctctaggattccaggcagtaatagcatttgctaaaagtagcctccaaatctttcaaggttatacgaagaagtcgaatgaactttagggacaatgggtgaagtgagtactccatattttgaggctatgttcctaggtgaagatatatatcggatctgctgatcggccacatacttgctagtatatatttcatttaccatttacataagagcatgcatgtcctctccagtaagcaaagaaggcagaaaagacagggatacaaaccgaaggtgagagcaggacaagcccccgaaatgaaacaattcagacaacatagtaaaaacccatgaaacagcaaagaatcaaccgagggcgacctcaaacaacagtgtaaaagttcataaacgccgagatatatataccaccctgctcgacatgttccatgtagccagtattagcaatctcaatacaggaaagtcaagttatttccaggcgttgagaccagcccacggatcggcggaggagccgggctgcgactgtggctgcgactgcgaaggggtcttgtggtgcccgtacggtctgctctgcgcatagccaccaggaccagaggcgtatgtaggacctgctgtaggaggataggttgtctgctggggacgcggaggaggcggaggcgggatatagccctgggcagccatatagtgcgagggctgagggccagcgccaggagccggcgtgccggagtttgagtagctgccgtacgggaccggggtttgagagaaaaattgccgattcgggggtggggacacgggggtctggtaaggatatgccatggggttgtagccatcggataggggagctgcggcaccttgctggaaatgctgggccgggtaagctcctggaccacctcccatgtactgcccgtagggcgctggagagtgggacacgcctggcaaggtcggagggtagcgaggtgacggctttggggatggaccggtggttccatacgccggtgtttgaaccgccgggggtggtgacttgacttttgagggcggttttgttgaccccgcggagggaggttccgttgataggcgctccatcagctggcggagcttctctcgctcgcggtcttcttgctctgagacaccgctggactgatcgcggttgttgaacgagtcgggattcctgcggagaccgtctgcactgttgcccacacccttttcgcgctcaatctgactgaggagctgcgcaccttctgaccggcggttgttgatgaaagtttcgacattcttgcggagactgtcgacattttcacacatttccttgtaaaaagtccgtgcttgcttgatacccgacgagagcccatggaaggcttcgtagaccttcttgtatcgagctagcacggaattgcgctgtcttgttatagactcccacttcaacttctcggattgaactcttttgtctcgacgaaggtcatcgtatagcttgttgagttcttttatcaaagatgattgtttgtgattcgcctgtacaagtatgttctgatatggcaggaactttggcaattgttttttgaagcattcggtttcttggccgacaatcgacttcaggtttagaatcaagaattccgtgatgtcatctgcgtggatctaaagacagagttagagatttttcgtgaacagacacgctaggatgcttaccgccgctttgagatctgtgagcagttgagacctctctcggtccacgagattgagtttctttagaatcacctccactttagcaatctgctctgcaacagaggcacgaccctcatcatacacatcatctagcagagtaccttccgccggactagtggcaccgtccttgcccttgctatgcttcgaacggactttgatcaatgctcgctggaagaggacatcggcctcatccgtttcgccagcagaccgcatctcatcaaaatcgctgtcatactgccgaaatgtggaagacaactgagaatcacttgcgctggcctcgttgatagtatctcgataagatcggacatcccctcgaagcgtggtattgagtcgagagctgggttgctggccccaatctgctccatactttgatcgcatcttctcacacacgctctcttctagatctagctgctttgagcactcatctaattgcgatagcacttctagcttgcgctcctgcaactcgtcgaatgccctgcggaagggactgtgaccagcaagttctgaacaccagcgacggaactcactgtccactgacatgtcctggttcatgccacccttcaagacatcgagagagcctggcaggtcgagggagagcaagctagcggccagctcactcctggcagtctcggccttttcagtctcagctcgaagcaacttgtccttttcttcggagtaaatactggcgatctgagttaccttctcaggcactagttttttgaagatgtctggcccagtgatttccgtaatatcttgtccttggtataattcgctaaccggtatcgccttggcagctgcaacccttgcaactggtgaaagaccagcctcattagggaccggttggtgatagatgaaatcattgtctttgaccatagtggcaagtaaagcttgcacatttgtttgattatgcttgacgaggtccacgaggttcggacccgcctctgccgtcagactggaggtcgctggaggcgacgaggggaatgtctttgcccagcttagagcagtggcggactgcttatcggccatctgtaaacgagcaatagcaattccataagatccgctctcactgtccgcaaccgcctgataatatgatgctactgatcccatatgtgctgccttggtctgcacaacaaccgtccagaccttgtcaaacacattcttttccacgaaattttgcattatctccgcagcctgcgagtagaggtacgctgcctgtccagccagcttggccaaaagcccaggcttcctctggtctgccacttgtttctcaaaaaacacctcttgggcttgagctagtgtgacatttatcagtgtcttgatggtgtcctctttcaggtcggttgatggcggatgtaagaagttcttattaatatatgtaaacattccggcggatgcctggaaagagtgataggcggtcttgagaccggtatcgtcggcccggctctggttggcagcatggcaacataggatggcggagatgttaaagataatggatgccttttcgaaggctagggagaattgagaagtagacgcatgagtgaaagcatcgtacctatagaaaaatagtaagcaaaagcggaatatacaccggaaaaatacccctaccatgtgaaagagatcttgatgtggttgtcatcgatggggaatctgaggtccagcagctctaactgactgtagtatcgatacaacagatcacggccgatagcgctgtctttccctacgcccctcatgtcctggcgaagtcggttgagagtcgcgcattcttggttgtatcgctcgggatcctcgccattgctctgtcgaatgtaatccttgaggggctggatccaatcaatctcgttggtctgcttcaacggacatgatagcatcggcgactgagccattgtcggatggttgccaggagcgatatgctcccatccaataatacgaaaaccgggcgagagaaaaaaacgcggggcagggatggtcagaagctccgtgtctgagggggtcggagtcgaggctgtggggtaagggagacggaacggtcagcgcctgatccctagtgcgtcaatgacgtcggccaatcaggtattcttcgatgcaaacaatctagaaggtgacacaataatggcagtattttgggaaagaaaagagtcgcctagagtgttgaagtgttggaatgtcggaggagggagatgtgggatgtgatatccgtggctgtgcctcgatgggcgccaaaccccaaattagccgctcaactacaaatacatagaacgccattgaacaaaacatttgaattttgagtaatatcagataattaatagatgggaatgatcacagtacagtcagaagtagagagcttctaaggcatctatcactcgagaatagtaatacaagtattctgcccctaagacctgggcagaacaggtccccaatatcgccggcgctatgacatgggtgaggtaaatacaaacggatatagagtacatgatgatttacattttcagctcgacttcttcgagctatccttgctgctatcgtcagcatccttcttttctgtgtccttgttggagtctttagagtcagcctgggatggcttggagccatcatcatgcttctccgtgagtcgatgccatacagacttcaggaaaccttcgttcttggcggcatcttcagcactactggaggtagagaaggggctacaagtgtagtcaattagtacaaaagccaatatccacgacgaactgtgcatcttacctatccttgttgaaattcattgtccgcttcgctgtcttatcgttcatctcgtctgcaaggacctccaaaatggtgcgctgattgcccgtcaggtacttaggcatagcaaccttgaattcgaccttgagatcgccattgggagtgaaaccgcgagcacggccattaagtttcttcatgcccattcctgacaaagtgattcggtcaccggtacccgtaccggtggccaccttgaccttcacttgattgtcgagagttgggatagtcacctcgccaccaaggatagcagtggtgaggggaatggaggctgtatatagaatgtcggacccggagcggctgaagcgatggtctggagcaactcgaatggagacgtaaagatcaccgggctgggtgcgagcaccagggggaacagccgttccagttggtggggagtcaccttcaccggtcactcgcagacgcatgccgtcttcgacaccgccggggatgtctatcttgatggtcttgcgctctcggacaacgccatgtccgttgcaggagccgcactctgatccccggggaacagacatacccgaacctccacaagcgtcacaggtggcggcgacttggaagcctccctgcatgagatgaacgcgggtacctgtgccgttgcactgacgacattgggaccgtttggcaccagacttcaatccgtcacctttgcaggttccgcacttggttaacggcgtgatgacaatttcctgagacgtgcccttcgcagcatccatgaacgagatgtttgtttgcacctcaatatcttcgccaaccaaaatttgttcttggaatgggttacgcccaccccggggtccacgccgcgctcctccggtaaaggctccgaaaagatcctcaaagttgatgtcgccagaaaatccgccgccaaagccaccactggctccaccaccaaagccatggaatcctcccgcaccagagaatgggctgccgccagcgtttggattgaacccgccattctgatcgaaagcggctgagccataccggtcatagttctctcgcttctgggcgtcagataacagttcatatgctgtctgggcttcggcaaacttgtctttggcctgggcatccttattggtatccgggtggtacttcttggccaagccgtagtaggccttctttatgtcgccggcggatgctttcttatccacaccgaggaccttgtaagggtcgggaacagccgcaagaggagatgtagtgtggaaggcctgtcgatcaaaaaaaaatatgttattagcaacccgaaccctgacagtccgtagagacgacataccctagccgatatcaccaaagattcttttctcttgcaaacgccctcccggaaactcctagccggagaagcagagaccgtggcatggtaatttcttgtttgcgtagatgagtgaacgctattgccggaagtctgcttagagcactgtcgctgggtccgcagcaggcgcgccgggaaagccgcggccttgggaaatgccgtggatggattcatggatagtaatagccgaacaacggttggacagcagtggtggttgtaagaattaaaggagatggatatttgagggaaaatgattcaagaaaaagaatgacagtttgaactctagagcaccaataacgttcaaaaccaatgtaagcttctctccggatcacagaagcttcgagtccttcggcagagagaagtttctcggaaaaacgtgtcaccggatgatgatgaaagagttgcttaccgaagcaatggggacgggtgctccgactacggaattccagcttccactctccccatttgtatctaatacttattgctgtcctcttggagctgtgtcacgggctgccacggttcttcactacatcctttcttatttccttcattccattgcccggacgttcacttcatactcaaggagcatgctccgcggccagaccctcccctggagagctgtactccatcaaacgccacgacctctcctccgacggccgtttcttgcatcaccgagatataatgcaacattccgatcaacactaatttcggcccgcttcggtgcctctcttccgtcgtcttcccgcgccttctctgcaagctccattcggcgtagagagaaacccccgccagaggaccctaaagaggaatcggaagaaaaggaagaggacgaaaccagtcacgatgataagggaacggaacgggcacctgaaccgcggaagaagggagccgattcagggaagcatgtcccttccgcagatcaggtagctcccgcgcggagaaaagaccggtcatccgataaagagcgcggagtggaagaggaagtcaagaaagaagccaatgcatcagatagcaaggggaactcgaatgacacaccttcgcccatcccaccaagtgatggtccggccgactccaagcctagcggcgcaagcagcggcggtcatggcggcaacgatgatagcgggaagaagggcaagaaggcctccggggaaaaggctttacaaaagccggcagttcccgacgtctacccacaggtgatggcaattcccatcgcgaaacgcccgttgttccccggtttttacaaagcgatcactattcgcgacccaaatgtcgccgctgcgatccaggatatgatgaaacggggtcagccgtatgtcggagcgttcttgttcaaggatgacaacgcggatggtgacgtgattgagaaattggacgacgtttatgacaccggagttttcgctcaaatcaccgccgcataccctcttcgtggagagtcaagcggcgtgacagcggttctttatccccaccggcgtatcaagatctcgtcgctacttccccccggagagcataccaaggccgctacacctccacccgcacctacgtcagaagacaagacgaccgaaaagcgaggtgatgtcgtggccagcttcgaagaaggcgcacccgagccaactcccaaagaccattacgaacctacatccttcctgaaaaaataccctgtcagccttgtcaacgtggaaaacttgaccgaagagccgttcgacaagaaaaatccaattatccgcgcggtaaccagtgaaattgtcaatgtgtgcaaagagatcgccaccttgaatcctttattccgcgaccaaatctcggcattctacaccgatcaatttccaggaaatctcagcgacgaaccggcgaaattggctgatttcgctgccgctgtatctgccggtgagctccacgagatgcaagaagttcttgagacaatgaatatcgaggagcgtctccccaaggcacttgttgttctaaagaaagaattgatgaacgctcaactgcaatccaagattaccaaagatgtcgaggccaagatccagaagcgccagcgcgagtactggctgatggagcaaatgaagggcatcaagagagaacttggtatcgagtccgacgggaaagacaagcttgtcgagaagttcaaggagaaggccgaaaagcttgccatgcccgaggtcgtcaagaaggtcttcgacgaggagatcaacaagctggcacacctcgagcccgctgcatccgagttcaacgtcactcgtaactacctagactggctaactcaaatcccctggggccagaagagcgtggaaaattttggcgtcaagaacgcagtcagtgttctcgatgaggatcattacgggttgaaggatgtcaaggatcgtattcttgagttcatcgctgtcggcaagcttcgtggaactgtcgaaggcaagattctgtgccttgttggcccacccggtgttggaaagaccagtatcggcaagtccatagctcgcgctctgaacagacaatactaccgattctccgttggtggtttgaccgacgtggcagaaatcaagggccaccgacggacttacgttggtgctctgcctggccgcattatccaagctctcaagaagtgtcaaaccgaaaaccctttaatcttgatcgacgaggttgacaagattgggcgtggtcaccagggcgatccgtcctctgctttgcttgaacttcttgaccccgaacaaaataactcgttcttagaccactacatggatgttcctgtggatctttccaaggtcctcttcgtctgtacagccaacgtgactgacactatccctcggccattgttggatcgtatggaactaatcgaattgtccggctacgtggcagacgagaagatggcaattgctgagaaatacctcgcccccgccgctcgggagctgactggtctgaaggatgtggatgtgaaccttgaacgggatgccatcgaggagctgatcaagtcgtattgccgtgagagcggtgtccgtaacctgaagaagcaaatcgaaaaagtctatcggaaggcagctttcaagattgtccaagacctaggcgaggatgtgctgcccgaagaggcggcacttacagaagcgggcaaggctgcccaggaggagtcaaaggagcatgagccagccgatcctgcgcaagttccggtcgagccggagaagtcgaccacagagatccctcgactggctctcaaggttcccgacactgtgcatctcagcatcggcaagggaaccttgaaggattacgttggacctcctgttttcacatccgaccgcctgtacgaccagttccctcctggtgtcaccatgggtcttgcatggaccagcatgggtggagcggctctgtacgttgaatgtatcctggagaacgcattgaatcacaactcgcgccccgggctcgaaatcaccggcaacctgcaaaacgtgatgaaggagtccacccacattgcgtattcattcgctaagtctgtaatggcgcgacaattccctgagaaccggttcttcgaaaaagccaaggtccacttgcactgccccgaaggcgctgtcccaaaggatggtatgtgaaacttatgttggttaatattgtaataagtcggcggctaaccattccaataggaccctctgccggtatcaccatggctagcgccttgttgtctttggctttgaaccactcccttgagccaaccgttgccatgaccggagagttgactgtaactggtaaggttctgcgcattggaggcttgagagagaagactgtggctgcccgtcgggctggtgccacaaaagtcctcttccccgcggacaacacatctgactggcttgagctacctgaggtgagtcatcaaaatcattccattcttagtggttactttagctgactgtttactctagaacatcaaggagggcattgaaggccacccggtgaactggtactccgaagtgtttgaccttctcttccccactctcgaccaggaggctgcccgtactgtctggcaaaaagcattggccaagcctaagaaggagagccacgaggtcgaggaagagtagcatgctgatacctatttgggtttgggtttcctctttgggtaatgtcgtatatacctgttgtgttttacgttgtataggatttgtgtgatttattgtgtacatggcgtctttgtcttccgacacggaatgcatggccggagttgaaggactgctagtagaccttttcccatgtgagagctgtatggattagagcgagagccaaaaaaagattactccactcaaagcaggaggtgtcctagtaaggtacatgtatagtctatagtgctattgccagcgataatgcaaagataatgcaggcctcacatgcactccgtattatcgagtcatattaatgtatcccgatttagggctgctgtcgtgtcatatagattgacgccaaacaaacagggcgtgaacggagcccccaatcaggcataagggtcaggccgcaacgcattctcgaatttttgatctgtgcgccattcgatgaatcatatctttactcgattttttactccctcacccttgtgtcccttagaagggcttctgattgatctcctgcaaggtccttttgcctccaaacatttcgaagccttgcagcggaagcatctcatcaccgctatcaaacggctgcaggcgattccttaggggagaaaatttagagggaaaaaaaaagaaaaagaaaaccacttatatctaaagaaatttcgtcttgaccgacatattctctcctccttttgcacccgcccttttaccttatgagcttgtactggaccggtctcccagcctcgcccattgcagcccgacgttgtgcgacacttggacgttggacctcgaagtgaaccttccaactcttcgaactaaaaggagactatttggaactggtgggacgaaaatcgtgtcagtgcgacacctaactttcctacctccttgaccctgtctcaattcttatggacatcggagaatcagccagcggggtgttcgagtcgttccttgcacgacagagcggcttgccgtatggccatctctgttcccaactcccgtagcccgacgcggctggctttggacgacaaaggcggaaatccgccaaagcagagcatgtggcaccggttgggattgcgaaaattatggcagggccgcgacgatcatcgagacacgtctgccggggagagtcaagacgagatttccccccgcccttcttctgacaactcgcgtaccaaacaagacaatttaacacgtcgactctcgcgaaaagttggcgtcggtctaccccgagccaccccctttaaacgacaaagctccgatctcgagcgactggctcctcgagaacctgatcatcgccgtgccctctccgccgaccgccgccccttgaccacccagagaagtaggtctccaccgcccaccgtgggccccagactgtccgcgcccgaagttcagtggctcggcccgacgcccacaaccacggtcgatgaccctcccgaaccagaatccgaaacgaacgatacccacgagattgacgatatcccagtaaatacgcatccctattcgggaatggagacggataatttcggggtgccagaggaggaagatgacggctcaatcgatctggagatggagctggaacaacggtggattttgaacctgagcatgcacttccgagatgggacagagcgagagaaattctttgtgacgtacgcggagacaccgaaccgatggcgccgagtaacgatttcctgcgattaccacgatgcaccaccctattcactggagcgggaattgaaggagctgcggtatcaacgcgacaaatgcgcgcgcatctacgaatccattcgcgagtcccttcttgcgatccaattctatgaaggtgtcacgaatctcaggctcgagacgagcgatggccgcttacatgttcatgtgacggaggacgtaaacgaaacaatcccgtacccgcctatctccagtgtgaggcatttggtcaatgcccctatgatccccgaggacttgttgcatttcgaatctcatttatccggctttgtttacaaaataaacctggacggacgtttttttatcaagaaggaaataccgggccccgacactgtggacgagttcctttacgagattaacgctttgcatgcgctaaaagaccgtccaagtgtgatccaggtggaaggaatcgttgtcgatgagtggcgaggtgttgtcaagggcttgctgattagctatgcagaaaatggcgcactggtagacattctgtatgagcaacgcggaaaaacgagctttgcgcgacgcgaacgatgggcaaagcagattgtccagggtctttgtgagatccacgaatcgggctacgtgcagggcgatttcaccctcgcgaacattgtggtggatgcagacgacaacgccaaaatcattgatatcaaccgcaggggatgtccagtgggatgggagccgccggaaatcgccgctaagatcgagagcaaccagcgcatctccatgtatattggcgtcaagacagatctcttccaactgggcatgacgctgtgggcattggcgatggaggaggacgaacctgaacgacaaccgcgacctcttagaatgggcgacgacgcgaagattccagactattaccgacggatagtggacatctgtttaagcccgactccgcgacataggctctctgcgaaagagcttttctcaatgttccccccactgccggaagcacgggtatcaacgcctgttcggtcactggaggacattgccaacgagtccaggcacttgccaatcaggaactgggctcagcctcagccgggaatgatgcagcaagatggccactattaccccgaaaaggaattttcggaagattcctacggtaatctgcagcactccatattctctgaaaatcacgacctcctccagcgatcaacaatacctctcgcagaatcgaatggagacatggggttctcatctaagccatcttcttcctctaccttgaatcaccacgaacctcacagccatgacgagtacatggatttctcccgccaattcaatgatggctcgtcactttacccaccttcttacagtcagaatccagaagctgctccagtttctcagacaaggtcaatggacaatggcttccacaaccagccagtggaactatcagcctttccaaatgagcctgtctatctcgaaagtgcccctatgaataatcagcaagagacacccaatgagccgacctatcgtaggggctctccaattaccgcacctccactcccgccccccgtcagcacatgtcttgctgaatcgcagaaccagaaggctctcaacccacccagtccaagggccgccaatgacgagggtaaacttgaagcctcagctttgccaattaaccctactttgcgtgactccagtacatcaagtggcactcaggccatccctttttcgacaattccgtcttcaattaagcaagcaaagcaagacggtgtggatcggccatgtgcgaagttcgccaatgaccaggatgaccttgaatcctcatctttgcccctcagccctaacttccgtgactctgagggttttattagccttcgatttgggaaagcttctcctatcgactcaccaaaggagaagaatgcggatttaccatgcgcaaatgtcgaaaccgaacctaaatcaactgagccattgccctcattatcatctctatctctctcggaactacctatcagccctactttccattcttctaaaacttccctcggcgctttgggcaccacttcatcgctgaactctttgcctgtcgaaccgtcaaggcaggataacttcaatcgaccacgtgcagaggctaccacctgtaccaagcctatacccacaacacaatccaactcaacaccttcccagcttcgcccgacatcgtcggccaatcctactctagctcgctctgagccttcacccgagcttccaagcgtccctcaatcagtgaaatattctcctatcgagccaccgaagcaaactcatacgaattcaccgtgtgcaaacaccggtattaaacccaaacttaccgagccatcgccctccacatcaagtctggcccgttcggaattgcctatcagcccaacattccgttcttccgtgactcccatcaacactccaagttccccttcatcacagggcccttctcctactgagccaccaaagccggagatgctctatgagaacgatatcacacccacattaccgtcaacatcacctcgacttccctcaatgcacatttcccacctccgccacaccggggcttccattggccctctaccattcgctacaagtccatctgtcgttggaattggactgctaagacggccatgggaaaacccatctgcaaataatccagatgtcaagtccacctcgacaatgccattagggtcagtctcatccctcaaccctcagacttcaaagaagcaagagagcgccaaaaaatactccaaccccatcgaaccgcaggagaatgaacattcactgaactccaactcaaatctgctgggttcgagattgccaatcagtcctgcccacccaaattcaacgcctagttcgacttatcttggggttcatggctcaccttcaagtcaggccaaaccgggcattttgagccaggcacgtttttcctcgaatcgaatatagtcgcaaatacatccccccgcacaaacaacttcgccctgataggcaagttcacacctcgaaccaacgcaagatcactaatatttttacaaaacaatcttgctacattggccgacgacgccacgacccatttctccgaacgagccccatattcggggccgagcactcgatacccttttgatttgctctgcttgtacagtttatgcctcgtcgtttgcctcgtgttattcagcttttggaagcattataccgatggcgggcgaacctggagtcctaaaaagtcctttgtttttttcttctttgcattttggcggattttaattggtttttgctagggtaacagcttttcttttgttttcccctgtctcttttgtgctctctttaatttccttgttgtctattctatggtttgtcggaggccctcgttctgcgttctggtgttctcacccgggaagtcgatgtatattgatgggatttttttatacctcttcttgtctgacagggctgtattatttctttttttcgttatttggcaatgcaattgttggctaggactgactttcgcattctaaccgtaaataggccctgctatctccttccatggagcaatgatttctttatgcttgatcatagacaatgaactctcctcatttggcaaccaaacaagattcaaaactctcccgccaaggctctgcacttggccctagtcctcgtccaatcagcacaattttgcactggagtggtttagacttatcctcggtatctataggctccgcatctcgaatctcgaatacatcccgcacggcttggatgattctgcttttcccattatccaggatcagtataccttttaaccgatgaacctcaaagtctacggggtgtggttcggatgagactgatttcgcaggcgcagggaacgttgtatcccacaagacagagcgcagccaggcatccacacagttcaccttatctgccgggatcggaggagtaacgatcgcaatagtagaaattgcctggttatagttagaatcatgagagcattccctgtttgcaacaagcaggaaacagaagaggatataaacataccgggtccatatggctatgtcccttcttactgaagtccaaatccgccaggtgatcataagcatgcaaatccaacacaacgccctcaatctgcggcgtccgactatgatctgtcacatgaatcttagccacgctgttaatagaggcaacacgatctcgcacagcctccagctcctcgtctgtgacgagatccgttttgttgaggatcaccacatccgcatgtgagatctgcatatgcgccattgacagaacagggccagaaccgtggtcgtggtgcacgtcatgcgactcggccttctcttcaggcgccggctcatccagcaagcgcatgatgttctttgcgtcgacaagagtgacaattccatcgaggtagatagagctgcctagtccttcgtccatccagaagattggggcgatgttgcccgggtcggcaagaccagtggtctctagaaggatgtaatcgaaggtaccgcggcgttccatcaacgactcgatagccattacgcctgagtctttcacggagcagcagatgcagccatttccaacttccatccactcggtcacttcttggccgccctcgtttactgtcattggtttttcaatatccattgctttgtgataatgttagaatgtaagtttttagtcctctggttggacaccttacagtcaccaaattctggaaattcattagcgacgtgtatcatatctcacaacccggtgtaatagacgaaccgttcatgatcaccgcaattttcttgccgtgtttctctgtcaggatataattcaagagagtcgttttccccgcccccaggtagcctaatcggcgtattagtctcgttttattacttaaatcaatatgcactctattcaatcataccagtaatcagggtgatgggcacgcgagctgttggttcttcatctaccgatgtttggtctgctggcgttgcagacacatcgataagctccggaggagcatcctcatcttcaaaattggcagacataatgtgctagtctttgaatgttgcgtaaatacgtagaagaacagagtctgaagaaacctcgtagatgcggcggatgacgttgtttcccaaagtagacgttagggtacagggctcgggcggtcagcggttgttatgttgatggttatctttagcgtctatgcttgctctccatactcgacctttgatctcattaacacagtttgacagggcgtctagagaccattcactctttttctgtttctcggtttctctcatttcatctagcgccctcgttttactgtcgtcatgactgctgcgggagtctccccgtcaagctccccgcggcttcccagtcctcctccatttactgaggttcagtttgggcctcagtcgccatcggttggcgactcctttgccaaagatacagacctgcttggcgtcgcgatgggacaaaatgatggctcgacgcgcagaatccggccagggaccaaatccgccaacatggcatctggtccaccagtggttcccctttcgcaggttagttgctctccactggctattttggacattactgataaatacagcttgattctccattccagctccaggaacacctcaaagcccagttcaataagcttgcgccccagtacactaaactcaaggagaagtacgatgtgcttatggagaagcacgaggtgcttatgaaggagtacactgagcagaagcttaaagcatctgacaaggcggacccgaactacgatgtgcttatgaaggaatacaatgtgcttctgggggaatacaataagcagaaccccaaaggatttgacaagatggacctgacgagcgaggttgcggaagagccgacagaaccctcaggaatcgagatggcgaaagagccgtcaagaccggggagcgaggttgcgaatgagctgacaaaacccccgaagggattcgaggagacggtctggaaatacgaactgtgccgcttcttcactatagaagccaaccgcctgatcgagggcttcttctctgaaagcccgccctgctcgtcgcaaacttgtcccgagatgcgagtcaacgattggcagtacatttgcgcgggcgcaggacacccggaagccaaatactgctgcgcgattgactattgctgccatactctggactgggccatgaatattctcacctcggagaagattttccctagccgacttagattgtcaggcgatcagaacaccagaaaccgcttgcatgatatcttccgccgcctttaccgtttctttgcgcacgcatggtaccggcatcctgctgtgttttcgaaagtagataatcatggtggtttgtacgtctttttcaagaccgtttgtgtttactacaaccttgtctcggattacacaatcccccttaaggccggaggacctgatgaagccgcagcagcccagaaaagggaagcggccaagaaaaggagggaggaggtcgagggaaaagaaaccaaggaaaaacctgccaacagcaacaaccgtttcaccattctacgcaaggaaagtgataacacattcggtactgctgtggagagtcaagacccggcgctcctcactggcgcgaccacccgtcgccataagcacagtccctccacaggatcgcgtgttacaactatcgcagaggatgcggaggatctggaagagattacgtcatcgtcattgcatgagcccctgaagcaatcgcttgaaccgcggcctgtttctgttttggaaatacggactccaggggaacgtaccgtcacggatgagccaattgtcgatgtggaagaatcctctgaagagctagttgaggaacctcaggaacagccaccgcaagaaatccatgagcagccatctgaaactgccgaagaacaggagaatagtgagcaggttgagcagaccgagcagaccgagcagactgaggagtcttcctccgaagagccggccacaaacacagaatcggccatcaacaagcatgctacggaaggcgatgaaaatacaacttcccacgaagaggagactccagctgaagagctcaaagaggcggtcgaggcggtagaagagccttatgttgcccccgaaaccaaacacgagccagagaaggaggaggagtcatgatatcaaaaccctctcgaacctttcatgccaatgttacacgactgtttgtatgtattcttacccttgatcagcgatgagtcgcaattctttacctaccagatacttttttgtaatatagttcaggatattgtttatgaccaatgtcaatgatacccattttcctgtgctttctatatattcatggataaaacaaggaatgtagtccgcgagtgaaggggacctcggagtcccgaggtgtggtttcgagattgatctgataagcgcttatcaacacatcgtccgacatcaccgaaaagctaccggggataagttgacaaccttcttattcacctcaatatctcatatccaactccaaaatgccagctctcaaagctaccacagcgccaatctactttggctccttcattgtcacaccacaggtaaattgctcatgatccactcaacccccagtcttctcaaccaacaccaaccacgttatatcacagaactagccatagacacaagtacaaccataaccatgaacacaactaacgccaacacaccaacaggtcttctacacaacgtccctaaccttcgccctggtaaacctgaaaccaatcctcccaggccacgtcctagtctcaccacgccgcgtcgtcccccgcgtcacagatctcaccccagacgaaacaagcgacctcttcctaacagtccgacgcgtgggtcggatggtcgagcgcgtatacggtgccacaagcttgaacatcgccattcaggacggcgcagacgccggccagagcgtgccgcatgtccatgcgcatataatcccgcgcaagtcggcggatttagatcatgccggtggcatggatgcgatttatgacttgctagatgggcaggagggggatttggggaacgcgtttaagaatgctgctcctacggaagagggtgaccagtctgcgaattcggggaggagatctaggctcccggttgtggataatgagtcgcgcaagcctcgcagtgaagatgaaatgaaggctgaggctgatattttggcgagggaaatggagaatgagcctcttgattaattgggtctatgtcttggatatgaaggtccgaggcaattgtgtatatttgaggttattccctctaccgaagcttcaattgctcgcggacatagaagttccaggtagaagctgcggtcttgtggcacggatgaactttggttggatcgactgtattacaaggtcaaataatcaatcgtgttcctccctcattcgtattgaattgaagactggaaaagctgcatagaagttgccgaggcagagctacacgtacttaccagataaccaagtttagtggaatagccctgtagtaaccatgtgctctcgtgattcgtcctctatggtatctaaagtacccggaaaaatgaaatgcaaatgtaaaaatgaagaaacaaacgccaaaaatgcaatgggtctttcaaacaagcccagtgcatgccaactcccccgtcacccattccctgcaataatgcgcaagctgcatgcatatttatgccttcttcggcctttcctgaatgacttccgcagcccaggcctgaatctcgggcaaccgaatgcgcgaggcgacgtgggtgaattcggtgagatcaaccttgtccgaacgctcatactcaaccatttgcaacaggagctccatcttgtcgatgtcatgcacgaagtgggcctcaagagtctcatccttctcgtactcctcaaagatttccttgattttcccgcctgagaaggcgcctccggggaccttgtcgaggagggtagtagcgatgtattccataacggaggcctcgcggcgagccttctcggccttggggatgtggtagtcgactggagtgatatcgccgacaagcgcctcggccatgtcgtggatcaaggccatctttgtgcagtgcgggatgtttatcttggttgccagggacggcggggccatcatggtcatgatcgacatgcgatacatatggtcggagatggactctccattgataccgaagcggcgccagccctcgcgcttggtggtcttgaggcgctcaatcaagtggaagaaggggacgggtgaggtagagttctcctctggacggtaggggagggtagagagcactacggatattagctttgcatagtctgaaaagaggagtttgaggcttaccggtctcggggctccattcaggagcgtcggacgccatggctgatgttattgaagagagagaatgaccgagaggaagaacgcagcacaagtaaagaggacaattgaggaggggaaaaacaatctacaataaaggcgggtctgataggcgctgcaaacagtgcaaaccttccttatctatgtttactctccgccgcctgtttactaaagtccccttccacacaggatggctgcaacaaggcctgttcggccgaaacccctagactggccgggtccctcacatttggatgtgtttattcgcagtctaaagctattgcatctggaccaacgcgaggattggccgggtatatctctccccaccttgagcccgacaccacagaaccaacgaaaccgaatccgactgatagaatgggccttgtatcacctctacgcaatttgggatccagagagcgctcacaatgtacagttactcaatcacaagcctccaattcgtgaacttggctgacatcccctacagaaactccgacccttcttccccccgttagagcctctacagtccgtcaacctccgcgcggctttatttcgatgcctaggcgaattgaaaaagaatggcgatctgggaagggagattgtccttcgcaaaaccatgctggatgattgcaagggcgataaattcgaggagctccttgctagcttctccgcggccgttctccgtaaagttgtggcggtgtccgcaaacgagatggtttggaatcctgccatgagactttcgaccacgtcagccatgaccccgaccgactaccggactctcctgccgctcattcttgcccaccaagtatctcttggttctgtgggagaacgccatgcccgagttcaagaggcgtatgaccggttctcgaagctgctggatgataaaggggtggagctgaccgaacgtgcggatcaaggctcaggaggtcgtatgaatgatatgcagagtgatcccgagatggtgcgtgagttacaaacaaattggctaggcagcgaggaatgggccgctgcactgctccaaggcggatcacaaagcaccgccgacgcttttctggaactccctttctcggcggcatggatgcaggcaaaaaactcgaatgtggacagttacagcagtggcttgaagcaggatttagtccttgatttggaggctcgcgttctggcccaacgaagtcgactgcacaagtggcacgaatataacaagtccctctcaaaggaaagaggtaccgacgaaacgagcacagcctctgctaaagaaccacgtgtgttattccgggatcaccagtctctcacaattgctagtatatcgaaagctgttcgtcagtctggggatcgcgggcggacgttgaaagggccggataaatatctcctttcctctgtaaatgaggcgctctctcgcatcaatggaaaatcccgcgtcaagcctgcaggttttacaccagaggttagaaagagcagcaaactacaattcagaagcttgtcggagattgtcagctcgccatcaacagtggcagaagactaccacaccccaggtcattcaccagacttggaaaccacagggctccgttcagagcctgagaccgagcccgagcccaagccacatccagaatcagaatcagaacatattcaacgctcgcccccaaccgtccggctctccccagacctcccctcgtctgacgaggaaccagctccagaacccatcaagcgctccgataccttggccgagcgcacgcgcagatcaatgtctctcctcccacccgtggcccacgaagcgccacgacgacgacgcagaccccgcccttccttcccagtcaaccagttcatcactccgcgaaaggcttccacgcactcagctcattcaagggatgatatctcgcgtgcttcgacgccgcaggatcggctctttgaggaagatgctgagtacgcaagtgtcttcaagtcccggccgcgtgtggcacttagtcctatctcgtcaccggctgtgcatgtcggcccctcttctgaggaggatagttttgatttggattattatgatgatggggatgagagtgaagattttgagtgggggcatattgattcgcctctagctgctcctcgattgaggcggtaggttgtgaaattagtcaaattatacatatgtacctatacatacctggatcttctctgtggggagggtcatttctattgcgttggacagaaaatatactacacacggatcataaggatgtcttgaataatggacggttcatacgtgaaatgacatggcgatgttgttgacagtgagttgattaatagtagcaagtgactaggtaaggttacacatcacttggtaatagacagtttcaattagttcaagcccagcgttagagtgctattggcttgactccttagatcatgcctccgtatattcacgggtataagattacgtttataaggtttaacatgaagcttatctcgaatcttaatatactactccgtacctaagctatggacatatagatactccgtatatcaattctaataatatttttgagcaaggtagaagataataaagaaagaatgtataactgaaaagtacatttcgatagagtaaactatttgaagtacctcaaatagcggtagagcagtctagaagcccaaaatacttctcaaatatcattggattataatttctacaggctttgtaaaaacaatatcccaacaacaaaaaaagccaaggattttaggtgcaaatgggaaagtggatctgcgacgaggaatcccataggacaagatgtgagacgtaggtaactcgtggcagtcactacgtgtttggccggcatagccctaattggtatagcctgcctaggacccggttatacatgtatattgtccaactagatatgaaaacagtagacggtgaatacagaatgacccgcacgggaagggaaggtcgagtggggagtgtctcccggaagatgaaacactgacgtttgagataaattggggacctcggttttcgagccctatactaatgttaaatccttggaagtacttggcactccttacctatatgcgtacttcaactgtacaatagtatagataaagtgtgattctaaattggaaaaagtacgtcgtactatgaagtagtaattgcatctgagatcctagtaacctgcagcggccataagcaagatcaagctcctagaaacttctccacgttttgccagcgtgacagagggatcaagtctccggaggcccttgctcatagtctggcgatcttactctttgtagtgtgtaaatgctgtaattgccctcgagcattggtctcgagataattgccccgccctcgtgcgctacttaggcccctcaatattttcatgtccgaatgttcatattttgcggatggtgtcctagaaattaagattaaatcagaatcttcccttccgaggttcttcggcgtcaacttctccctcatggcgtctccctccacactggctcactccctaggtcataataccttgggaaagacagatatcgctgtccagtcggtccttttgggtattgtttttgtttttgtcggtctgcggttatggtcgcgacgattccagtcgctgcaattgaatgatttgttgattatagttgcgacggtaaggctatctatttcattgcttattctcagtgattggcaccatggctccccgcaatatctccacaaagctgaccataaacatatagttcttgatggtcggtcgctatgtggtggaaatcatgatggtcgtgctgtgtggaatgggactgcattccacagaggtagcccaggtccgagggtctgaggttttcgtccaatttaatgaagtaagtcacaatgagtggcatctatttgactcttgtcgatgtatgttttttaaactaaccctaccatcagcttacatatgcgggtgatcttctctgggtcacggtgatcgcattggttcagctgtccattctcaactattatgtgcacaacttcagtcagcgagctctgaccgtgttagcatatattatcacggtcctatgttcagctctctgggttgcgagcttctttgcaacagcgtttttctgcaccccgccgaagagaatatggcttgccgacactccgggtcattgcggtgatcgagaaatgttgcataccagtgtcaatgcgagcgaggctgctctcagcttcttggttgtcattcttcctgtttcctggatgtggcgcataccgttatcgaagaccaagaagattgcactgatttgtatccaactgctagggctagggtgagtaatccgtgattgtatctggacgcaacgaatatatatattacagacctcatgactaaccaataccctagaatcatcactattattgccatccgcttgaaaagcgagtttgacctcgacccagaagacacaacgtacagctcagccaggaagtcaatactttcatgcatcgtgcctcctctggggataattgttgcctgcctcccaactctggagccagcaatccaaagcatgttcaggaagccagcgcttccatctacagcccataattctatatatgatccatcctttgcgaggtattggaaggcgacggtcctttcgggtaaggggctggaggaaccagagatgcctctggtcggtcttactcagcccttcatggcaaagatgagctatcttgctcctgggaatatacaggtcacttcacattgggagattcattcgtcgcgaggttcagcaagacttgatagatcacccgtgcggtaggtccgatgggtttgatatcgggatatttggggcttatatagattgaaatgcatagatctagacttcagggctggtacccgaaatgaagtaagttccttttgctatatatttcctcaaagtacagtagatgcatatttaataaaagttggaacggaagtcatactcgacgagatgtatggacctgaaggatgaagatctctatgcatatagatcggtttacgtgcctcctttttcgcccttgaattcttaattacggtatacagcaagcctaggagagaaaatctacttaataaaagacgaaggcgtaaactagtctacatactctcaaattggtaaacatggctatgctttatatgtcccggccgctgagtcttttcataacaactcatcgtggttggccaattggcctagtggtaaggcatccgtttccggtgcgggagatcgtaggttcgaatcctgcattggtcgtcaactttttgctattcttctataggaatacatttttgcgtctttttagttactgcagtcacgggtgaatgctgggttgttagggcttcatgcacattaccgcgcgaatttccctttcccttctagtacttaccccctgccgcttttttctcactgagtataactgagcatggatgccctggtgtattacgtaatcatccgtttcgcgcagtggacatcagctgagcagctaataatccactcaatgcgccctctgtttttctagaatgtctacaggcaggtcagggcggagaggacgaggatttgtcagcttaagtacttatgatttggggtctcaaactatatcagagcaacaagcccatcatccttttgagccttcgagattaagatcactgatatatatgactgacgatggataatgcaatctcgacggactcacctcgtcagccgaagaaagtgacacttgcatgcgaaaaatgccgtgtccttaaggtcaaatgtattcgacccgaggaaggacagccttgtactaagtgggtatcacatccctgaccgtatacttacactctggttaatttgagtagatgtgccagatcaaacgctcaatgcgtattctcagagccgaaacagcgagctcgagcttcacaacgaacgaaaccgtaagtggacgtggagggtactcccctcaagatgtcacttttgctgacaggcgatgaaggagattagccgagctggagtccaagctcaccaatatcattggtcttctatcacaatctggcgcaccccttcatggagtccaaacacccgttgatccagattgtgggctggctgcaattcctgaatattccaacgacaacccacacccaacagctgaatggatgagccaagggtacctggctgatcctgagttgaacgaagccctaggggcgagcgaagagcagaataccaccgaagttgtcccagaaaagtcttgggacgccactgcgatagacgctgcatggatcaccgaattaggactcggtcctgtcgtcctcgagcatcttctagacaagttccgcggcatggcgtcctattttccgtttgtgcagctttcatacgcctggactgctgcatcgatggctgaggaccgccccttcctattacttgcagctgttgctgctgcttcctcacagtactgtcaccttcaagacgccctgatcagacaatttaagcagactctcagtcagcgggtaatcatagctggcgaaaaagatctagatctgctccagggattacttgttcaccttgcctggtaagatttcagtctccatactgccttcgcggcatcggaggcaccggcaagctgaccaatgtcaggtaccatttccactttgttccaggaagtgcacaatactaccagtacttgcaaatcggaatcggtatggtcattgagcttcgccttgatcaagaggctgccgaattgcttgagcaacgaactgagctaggtgatgcttatatccgagaagcatgccgtgcttatctaggctgctattacatgtctagcatgtaagatgccattccccgccagatacacgccaatgagcttgagctgacttggatagaatatcaatgtcttctggaaaacccaataatctccagtttcacgaggccatgcttcgatgcgctatgatcctgcaacaacagccagaattcgacacagacctcttgatatacccagtgacgaaagtgctacagttcgccgaggaagtctgcgagacttaccaatccgaaggcattcatgggactcggctgtacattcatgctgaacgattcacgacgcggttagaggaatggtggtcgtctctatcaacggatcttcgcagcacgggtaggaccatcccaagctctgggcttttgaattagctgattgagaatccctagtgttgctgatcaactgctatcataccgtcaagatccggattcaagaaatgggcttggtatattgctatggacagagaaggccaccgtctccaaaggcacaggaagattccaccatgttatccacacccccaatggtcatcagcaacttggtcaaatgcgtcagctctaccaaggagtatctcgatttgttcttcactattcccgctgtggagcataacagcttgccaatttccgcatggtatcaagttattttgacgatatttgtgctttacaggttgtctgtgggactgccagaagtacctgaatggaacggggagattgcacaggaaactgtgaatctagaggaataccttgatacactgctgtctaatctacaggctattaaaccatcgcgagataggcaaatccccaccaagagcctcttttcaatgatgcatgagatcattgggagtgtgaagaattcctatgcattgacaaaagagaatctcgcacatgttcatgatagtcaccatgcacatcacgaccttgcttcaaaaaacacagccgcatctgctcaagggctgcaccgctgccctgcgttgcggtattcgagtcgccgcatcgctcaagctccggatcagcctacactacaaaacgccattgctacggaagtccagaagataggagatgagaagctgtggggtgatattctattgatggatgcatttcatagcatgacaggttcatcagctacagcgttttgacaagttatccatgctccagacctcaaccctgcaagcccaaaataacatcagatctcgttcggaaagacatgggtggaaatctgatttccggccgaatcgtatcggtggggcagcacattgaaaagtccatcaacatcccgcggttcataatcaagcgacaagcccgcgagagtaagaatttccagcccaaaattctctttgatccagtgggcaaccatatccatgcccgccactgctccactcccagtccagatattgccatcaatgatccacttcttctcctttgtccacttgacattcgggtacttcttcttcagccaattgtactcgacgttattgaccgtagccctcttgccatccagaacgccggtggctgcgacaatcccagcaccagtgcaggtcgtgaacagcagctttccagcggcgacatggcggcgaataaggccctgcagtttcggagcaagattgctgttcgtaggactatccccgccgacgatgagaatatccaattccgggacgtcatccgcagtgaccgtaggcatgattgtcacagagcttgtaagcaggtgcaccggctccagggtctctgcgatatggtggaagacgaattcgggtgcctttgctataaggttcggatcgatggggttgaagaaactgatagcctggaggagcgccttactcgcggaattgagtacatcgaatggtccgataacgtcgatcgcctggtaattgaagagcagagcgccgacgtggatgggagccattttggtaggtttatcaaagacaaatgtcaaaagaagttgatttgtttgttgatttgcttgttgatagtcaataaattgtgttggctgtctttgctacttaaatactttagggctgccattttctgggataccataatcgcggagcgggattgctcgaaggctccgccctccgtggtcgacggtcttggcacggacaacgaggtaaactcatggaccgtgtccgtgatttgtggatttgaaatctatattggaagattctagagctttagagtgcgaaattgagtatcgagatgcttagagtaaatgttatgaaggtatatatccaagagttatcgatcttgtctcgttacgacttggtttccctatgtctaggaagttttgatcccagagatgatctgttcatactagcagatctagaccttcaagaaacggttcataaagatttgttagtatgtacaacatacaatgtaggtcctgtaggcggtgatcgtttggaaggaggggtaacggtaatagagcaaccgaacacccttttttcaatcagtcccttcaagtttcctaccatctcctcagtgttaaaagacagcctaacacaaaaatgcatatccctctagagatatgtgaccaagtaaacactctgctcctaaggccttaggttcggtgctaattatctacacagattgcgtattatgtctggctcgatgacggccgtgctctatatctgtgggacgctgcaaagcattactcggtaccttactggaggagtcgaaaagacttagggaatctgcgtcttgtcaacaaagctttctgtcacagtgccgcatcctggttgttccggcacattgatgcgagatacagcgcctgtagaggacccccacatcttgaacgacttatgaaactatcaaaaagcccctacgctgtgtatgttcgtcagattgatttcgggtttcaagagacgggctcggaatctaccgcgtataccgccgcattgtatatcgaagacctctttggatgcctgtcatcttgtttgatcaagttcttcaacctcgcggcgcttgaatttcacgaaccacccctgggcctttcacaagagcagagaagggcctatatggatgcggtttcttcgactttacgttacgtgccgctttcaaatttgagagaactggagttgaaattccccctaacctatgatttcggacgtttcttcccgacccagaccagttcggtgcagatccctatcgaggatgtcacgcaaagtcttcgacatcttggattatattcctgtgaatatacaaatacgcgggaccaaaggtactggttgaaaccagtttcgccagaaaatgctgcactcccgaacaacgtttatgccacccgaatgttacggatgattgaaattgcgccaaatctccaatcgctcgcaatacatagtctcgacgttctggatattgactttctcgcctttccatcctctctctgcctacggtgtcttgatctggggggagtttctatttcatgcaataatcttctctcacttatcaaccaatctatccacagtatacgctatatcaatttctcgcttgttaaattgaattctggaacatggagacaggtcttggtacgaatgtgccagttaccatatcttcttgatatcattatcgatgccagtgggtactcgttgactggaaccagctctgatctagctcttgggctgcttccagaacgagattgtcctcaagatatcgaaaccatagattccttcgatgtgcctgccttaggcaacttacaaagacatgtcaattcgaacaggatcgcttttgggctgcagccattcccagaaactgattatcgacatatcaatggcgcctctttggagtatatgctagatttataccatgtctgatttaagactaaacttcactatcgggtgttttgtcttcgtgtcatttttatctacattcaagattctgattggtgaacttagaacgcgttttattggaactactccattgaggggcgacatttttttaactcagtaatcgtacattctccagtttttactcctttagtcccgatgccagcaacaatcaacgacatagttatatattgtaagccgggatatacatcggtttcctagtaggttgtatgtttcttgatcgtacttcagcaagtctaagtgttgctgttcctataagcattaagttgagggcagcaaccagtgagcctccgagagccaatcattccaaataaaatactacgttggtgacctagcgaagtgagagcaaaacagtactaggataaaagatattgcaccttaagcagtctcagtacctaaaaataacccctgcgtggaatagctttcagctagtggctttgccacctatagagcagactgagataatgaaaatgcatggtcgcgcaggagttgtggagaagcagcgcgccgcagcgtagttcgaaaacccctgtacttgccaatagtttctaagcgcagcatgcatgaatttgactacgtgtatgccttgggcgccagactaaaggttgggcagacaaataaatctctctacaactacatctgttcttcacgcggcatctacgtatggttagcattccgaccagcttcaatgttataaacatggttaaaaaaaattctattcggctttactgtcctgggtgtgagagggggaattttcggagtttggttggtgctagaaatcatttccaaaagaagcgtcactctctccagtgtcctatttgcgaaaaaatctttcaggatgagacggcgattatacaacattaccaaagctattataccaagacagcctcgccgggtagagcaaacgatgttcaccagatatcaccgccaagtgtactatcaagcgcagcggtgacacccgttgtgcggtcgatatctatgcccacagttgtccccgatgagccctcgagactcatcgagcagggaccggaaattccaggtggtcatttgttacatgatttactggcttctatgccagcactaaacatcaacgaaggccctatactaggtaaggaacctcgtatctacccactgagtaatccgaggcttatattcattccaacagaagctctaccatgtgttgcatctagcactgcggcttatccagcatatatggaccttctggagcaggatctcatcttgcgatatctacgttcgaggtgccattcatgcaatcgtcttgagacggaaggatatatcataggtcccacaaccatcagaaacaagaaaagcccacgcaaaggatcaattccaacctatcaatttcgagagacacctagcacggagctacaagctgcgggcactgtttgtgccatcgcccttgactgtgagatggtcggagtgagaaacggtcgccaaacactcgcttttctcagtgcgatcgactttttgaccggcgaagtgcttatcagtcgctatgtgaatccatccgaggaggtgcttgactggagatacaagttcactggcgtgacgcaggccattatgactagcgccgttgcctgtggtgcagcattcggaacctggcgagaggcacgcgataaattgtgggagtttatggacgattcgaccgtgttggttggtcattctctccagtacgatcttgaagtactaggcatatctcatgcaaaagttgttgattctgcgatattgactgctgagactgtctacccttccattccatcaacgaagccattgacccgcaactgggcgttgaaaacacttgcgaaggactttttgggcttgaacatacagactagcgattgcgggcatagtgctttagaagatgcatatgcagcacgagatgtcgtcatctggtgtatcaggaacccggaggatcttaaagtatgggcggaaaaagctcgactccaggaagagaacaagctcacacagagccgacaaaaatatgctaaaagcaagtccaagggcaagtttcctgccacccagtatactccaatttgggaacataatacagtattcgacgatgtccccgaagattttcgatggtgggattccgcggaggagtttgaatggtccaaaggatatgactcttggtctgattgatcctggaattgcgctcatggatttcctgaaatatgcaccatttttagtcattccttccctcctctgccactttactttatgtcgttgattgattttggaaccatttcccgagtgccaggcatcatccggtacatctgtcactatagcgacctatgtgtcgcgaacaatttatagctgtcaagattggccaatcctatctacgtaccatgagtgagcgctactattatttatttctcttatatagttaggaaaagtgaactaagacgagcgaaacctcgagggcggtgctagtgattgacgccttcaccgccaacttcgccgagtccggacctgagacgcgcagctgggaactcccgaatagttacaggcattacaatgattggcattcattcagagtacgtgcaagtcatacctcgctttcatgacctaccatactcttcagccaaaactcgacgaacttcccgatgatccggtccttgggattcttcaatttactttccaccccgaggtcgacgtcttcgacgcatcacagcgcgcatcaacactctggcagaagtctttacgctttgtttcgactatccctggttttcaaagactctattggtcatcagtgaacgatgtctcgccatgtcagcagattatcgtattgatccagtgggaaagcgtctttggctggaaactatttcagtattctcttggcttcagcatgatgttgggatatatctcccaagcctctaatcgttgcgtccaaattgatttgcacatcgaaattcctgactcatgtcacctcgaactgatctccttccagtttccagcagctctatctgcttctcagctagacgagaaatctggtttcgaagccaaatggggaagcgcgttttctagacccgtcaatggaaaagtttctagctctgaattagcttacgcctgtgggcaatggctccaaagagacaaagactcggaggaccagcttttcattggcctgctcttttggaactcaactccacaatttgacggccatctgcagcttcaagagggaggcagtcaagatctcacaaaacatatagcggagcttatcgaagatgcgatgcatatggtctcggcttgcacgggccagctcaatcacgtatcagatgatcctcttccagactccccgcagtgtcaaatcaagcatcaagcttttcaagcagatgtaaaaccagtatacagcgccaaacaagatcgaaatgagtctggtaaagataagtatcatgtggaaagtatgtctcaggcgcgaagaaacccccgggaacgtatagctgctgggcccgctggtgcatggtatatgatggcacacataactcagcatcatctaccccttgaaatcaactgttctgaggcggattgcattcaaatgatttctttccgtgctcagcgtggaaacacaaaggtgcagtgtcaacttgaagcacttcgtgcgaaattatggaaactaggagattgccccccactagcttggggtaaagaaaaagaaagtggaggggacagcgacaaattcttactattccttggtatgcttgccttctctgacatggcaaaatgaattcatatctaggtagcggggttgactccattatcgacaagtattgagaaccactatgtcgtcttcgaaaagccagatccctggatgatcaccgatatggcggaaagaaggagcgcgagaagccaatcgctccacagtcgatttttgatgtcccctgggctacttaaatataccctcacacgattttaacccttcttagacgtcaagaggcaggtcatgtttctctcctcattagagacgcttttgaggtgagaaaaacagtcggtctagtatagtgcacagtcagccgaatgtttaaatatatagtggtctttcaaacatatgcagccgctccgttaatagtcgcacttttatgtccctaaagaaatcaagacgattttagtccggtttgtgcatagtgaaagtgtcctaaaatctaatacctactacatctccgtcactccggattgctaaccgaagatgatcttagactccatgactgagcctactaggttgcgattgatctaatgctaatgacagtctccctgaagtagtgtcagcggaagacaagcgatggtacagtcctattattaatgcctccctcagttgtacttttggtagcttttaggttttctataaaggtatagatagatactcactccgctgagagttttcgttaaatgtacgaatctgccatatgaggatgaacaaaaggccccaaagataataataaaagtcccatcagtcagataatagggagaaaaaaaaagataacgaccaatgcaggattcgaacctacgatctcccgcaccggaaacggatgccttaccactaggccaattggccgccttgtgtagaagataatgagatatatgcataacaaagaagaacacaaaatacatccttataaccaacatacagtgcttatgtagatcgcggtctgtaaataccaaccaaaggttgaggtggagtttacatatatacgggcgctccgaccgatcattaccagtggcagtaaacaaatcgatgagatcccaagcaggaggcaggatgtctcccaggaacaaactacaaccccttaagcagggcgtattgcctaccaccaatcaaccacccggaaagaagctcgcgggattaaatgtccagggcagaagcactagcagtgcaggtcttggatcctacatcgtctcccacgattagccagggtcatcccttgcatagcagggaggtgaacccatgatcgacggggagatttgtcgaaatcaagcatcggtgcattcctgttgaaggagaaaagaatccagccacactgtcagagcggcgaaagaagctacaggattcgccgcgaggggtgttgatattggagcaggccgcgacaacaccccttcatatctcagttctgacagaatgcgaagacgatccgtgctagaacgattatagaaagtctgaaatcccccgaggtgactggcattccctcagacgttcattaatatcccttctttgttttttatttacaaatccagctccgtcgctcgccgacacttcctttctttcaccttgatacttgcgatacaggtctacagccgacacaatggttaagactacttacgccctcacactctttgcggccgtcagcttggcggcccccgttgcgcagcttaccgggcgtgccgaggcgcagggttcggttgagcacaagaatatcattggggatattcctcttcttggacctatgctcgcaggggtatgtgcttttagtcgataaagagtggaagcaaagaaactgacagcaatcgaacagaagcaggatgccaagcgcgatgagcaccataacctgatcgacgagcttccggttattggaaagcttcttggcaacgttagtttacccttctctctcgaatagagatagacaatagagtattaaccgagaccccctaataggacaagcagaaccagcgccgagatatcgggaaagatggtattagtggcctgccaatcatcggagggctgttcggaaaggtatgtatcttcagccagcagtcatttaagggacatgatattgacggaacactagcacacacacactggtggcgagaatggcatgaacaagcgccgaggcgtcgatcagaactatggccagaatgccgggcaaaatgagggcgagaacgcgggccagaacgcaggccagaactcaggtcagaacgctggtcagaatcagggacagaatgctggccaaaaccacgatgaaaacaaaggccagaacgagggccagaacggaggtcaaaatgccggtcagaacggaggaaaaggcttggaggacgaactggaaagcagcctcaggggtattcccatcgtcggaaatctcctcgtgaatgtatgacatgcgttatcaggcattgaagcagtccctagaaccaggaaaagaaagctgacctaacacaggaccaggataaacagaagagcggaacccctgccaagcagctcgatacccgccaggcgggccattccaagggaatcttcggtgtcctgcagtctttgactagcagtggtgtaagttctatcccaggccacacttttgaggtacacaagcgctaatagtccaaatagcccgttaccaagagccacaagcgcgccgaggagttggagcaactggactctgctgcgccgaatgcgaacgagactaagcaaggtgccaagaagacagctgcagaacaggcagcaaagccgagcgagagctccggcggcctcctcggcggattaatgggcaaggatggcctcggtgctctcaagggcaacgctcaccacggccttggccttttgcccgtatgtgccacctactagcagagaaacagctcaccaagctaaccttcgtttagatgcgtcgtgaccaagctcccatcgagggctccacccttgctggtgttcttctcgagggtggtgctttgggaaaagtaactaatttcctttctggtggtgctatgcccaagcctggttccagctccccttctaagatcggtgatggttctgttgcgggtccccctgaccctgcgtctggtgctggtcctcactctggccctggtcttgctggtgagcagaagcaggcctctggtgctgccttctgagtaagctatatgcggcacaattgcgtgtgttttagttcttctcgatcaaattgtgacgaggattttatgaaattagttcgttggactagtcgaccgacattggggatgtgcaatcggtaatgctattcagttgttcagtttttgagttgtcatttattcttccaaacaatgtcaaatgctttccttgattcgatcataaagcgaagcttcagtgtaaaaacacaggcaattttgaagtctgggcatagaaacccgcaggaaaacccaagccctgccacgtaatgagacagacagacgaagctgcaagaagcgcaagcaaaaatcaaagacaaaatcgttaatcgtagccaaatcaaaaccggggtttccggtccggaccacccagttaaagagcgcccttggggggtatcaggtcgttacacgcgatgaaatcaaaaacagccataccactcgagatggaaaaagatgctcggaaaggcgaatcgcagcctaatcagagtcatacatgtccacatcgtctactaccaccgtcgtgcccaacgcctccttcccttcgcggatcatcgcctgcaactgcttattcagtcgctggagactggcatcttcttctcgttccttgcggcgcatcttagcagcctgtcgctgtatatcggcagacacgggggcatccttcaaccgaggggatggcaggcccccctgtcccttagtaggcgagtggggtccgacggaatacgcagtccgtttagtgagccggggcataacagcggatttccgacgaggactcgatgcccgaaaagcgcgtcgtgtgcggagtgacgggctagcaagctcgctgcccgcgaatgcatccgagctcccggggaccaccacccagctcgggtcaacctcgtcgtctggatattgaccgggcactggtgtcgagcaaaacgtgctcgggctgtacatatctttctcggcggatgggctggttgggggcagccagctggattcgagagttgttgctgggctggatgacatgtcgtagccctggcctcctcctgcgtaaaaccctcggaatgcgcccgtccagcatagatcgaggactttgctcacggctttgatcacggtctggccccagcctgtgggtgtggtgctggggctgtcggggcctgcggatatgatgccagagtcacggcggctgcgcttgcgactgccgttgtagtctgctaggtttgctgactcgtcgctggaatcgaatgagggtgggaggaaggattcgcggtatcggtttggacggtaatctagctcagccgaagcgtgcaagtcgttgcctccgcttacgcttactgagcggtagttgggttggatcatcggagacccggtaaaattggactcattatgtgccgaatgtttctctgtgttacgacgtggtcgcttgcgactgaccgagagagaataaagcgacgtggaagccgttgaggctggcactttgaatagctgggagggtgcatttgagaggtcgagtctaggagagttgaagacagcgtgcatgtctggcattttgaatgaaagaagggataaagacaaaatagatccaagatcaaaagatcaaaagatcaaaagatcgaaatcggagaaaaaagaagaatttctgaagaagaaaaaaaaagcgagaggttggatgttggccgtggcggcaattagtgttttccttacaagtcacttctttgtctcgcactatttaaaccccctacatgacctcatatatcagatccatttggaaattacaatcgctggctggtccattgtattccagctgcctccaagccctcatcaccatcaactaacacacaccatccctcgctgccccgtcctccatcgcccgcaatcaccgcctcaaagtgactctgggcgtagtccagcacttcctcatcaaaggtgccaggttgcaaccagactgcagggatcccaaccgagtgcgcttccttcagcaactgaagggtcacaatcgggggagtcacaactgagagagaagtctgcgccggcgatggcaaaccggccggcgacgggactgtatcataagcacgcgaggggaggttgatttgcgctgctcgcggattcagcggtgtcaccggtagagagtgttcatgataccaggccaggactgtaattatttagttctctatccaaatgccaacagagcgtgttgccctactcttgtatccgaacttgtgagtgtcattgctggcccccgccaccgcaaagcggggggaagagaagaatcgcttgactgctgacattgtgctttaatgataatccggtagaaggaattgatttatgttcttgaagagtcagatagttttgttaagttggaaacggtagccaagtaggaaagttgcaggttgcaagttgcaggaaataagtcaagcgattgcaacctcggccgatgacgactatcccttcatctcccatctccgacattcggcgaacttccttatttctcatcttcacattcattcgtacaatttatgccaccatttctcccccgcaagcgcgtatcctccgaggacccgcccccggccaagcgccaggcccggcccgataattctcaagctcctccccaagctccccaagctccccaagctccccaagctccgttccacctctccgattccgactccgactccaactctttgagcgatgcacctgaaggtctcctcaaggaaaatgcctctgcgtccgaagaatccgaagatgaagaagaggatattgactgggaggatgcgatagacacaaagaccagcgtcactagacccgtcgcggccccggagctacaggacctagagttgactctggaccaaaatgagacacatgtgtctgatcttctggagggtaagaaagggcctagtaaaattgagcgccaaatccgaatccagacgcactgtatgcatgtccaatgcttgcttttccacaacgccattcgcaattcctggagcaacgattcgaaagtgcatgagatcctgcgcaaaaagctaccggaagggattcagaaggaagtcaagaaatggcgtatagcgtcgggcctagaacttccagagccgaaacccgaaccgaagagtaaaaagaaaggcaaaaaggccaagaagaataaagactggagtgatgagtccgagcgactggaaccaggccagccggatatgagccgtggtgatccaattatcatattgatgaaggtgctggtcgcatactggaggaaacagtttcgtatcacggcgccaggattgcgaaagtatggatatcggccggtatctgcccttgaaactgcaatcaccgacttccgcgaggaggagcatgacccggagcgtcatggtgagcgtatcgccaacctggatgagttccgcgcgaccgccgagcgtatgcagggctcgcgggacgtcggcgcacagctcttcacggctctcgttcgtgctctaggcattgaggccagactggtggctagtctacaaccgctgggctttggctggaccaaaggagagacctacacacctctcacaccttccaaggcagataaggaccccggggatgaagaggagtcggaaggatccgagcctgagactgacgctgaaaacaaagtaccagcgaagaagcgtaagcaaatcgatgcggatctgccatttcctatctattggaccgaagttgcctcgcccgtcacgaatgagatcatatctgtcgacccgcttgtgctttccaaccccgtggcgccatttgcagatacagatctacaagcaaacttcgaaccacgcggtgcaaaagcagaccgggccaaacaagtcatatgctatgttgtagcccactcgtccgatggtactgctaaagaggtcacaacaagatacctccgacggcggacctggcctggtaaaacaaaaggcttccgaatgcccttggaaaaagtacccgtaggccagcgcgggcactacattgcctttgactggttcgggatggtaatgcgcgggtaccagcgagcccgcaagagcaaaaccgcagtcgacaaactcgaagaaacccgagatttacaacctaaccaacccgaaaagaagaaaacagctcaaacagccgatactctccaaagcctccggacctccaccgagttcgtgctagagcgcttcctccgccgcgaagaagccctccgccccggcgccgagcccgtccgaaccttcatcgctggaaaaggcgtgcgggccaaagaagaacccgtcttccgacgagcagacgtgctaaaatgcctgtccgctgaaagctggcacaaagaaggccgcaagccgagaccgggcgcggtagcgctcaagcgcgtgcccatccgcgccgtgaccctcatacgcaaacgtgaagtcgacgaactgcaccgccagaccggcgagaaacccctacagggtttgtacgcacgcgaccagacagagtacatcatcccgccgcctattcaggacggccgcatccccaagaacgaatatggtaacattgactgtttcgtgccgagtatggtgcccgagggcgcggcccatgtccccttacctggtaccgtgcgagtatgcaagaagcttggaattgactatgcggaggcagtgacggggttcgagtttgggtcaaagatggctgtaccggttattcagggtgttgttgttgcggccgagaacgagggtttacttagggatgcttggaaggttgaagctgaggagaagaggaagagggaggagctgaaggcagagaagaagatcctgcagacgtggaggaagtttctatttgggttacggattatggagcgggtgagagatgagtatggaggtggagatccagatgctgatcgggagcgcgattcgcataatcccttcgctgtggagaagaaaaagcgggaggaggaatcggaagatgatggcgatcaagaaatgcctgacagggagtcgtcatataacgcgattgatcatggtggtggctttcttcttcctggtcatgaagatgccgcagacgatgggttgatcgtcgagcaccatgatcagcagcagagtcctgcaggtccgtctcacaccgattatgacccggatgacaacgagccattcgaatctggacctccttcggagtccccgccggtgtctatctcatcgggttcagataacgaggtggataataatggcgaggaggaagcagaacctgaatacgttcctcgctcgacacgacgaacgcgaggtcgttaatggaatcaatgtatgtacgcaccatccatattgctggggttgggttgtgtttctactccgtacgaactggtcggaatgccttcccatgcaaatagattttgtcacagaattcgaggatactcccaccaaagcaagtctattttacgttggagatctcagatatagtcatacgactacttttccaatgttcattacgactaaatatgccaccagatcataactctcttattggaaactgccttaccgtctctattaccaccttcacgaacgctagttctttcattcgcaagaccatatggcttttacactgtagtagcccgtaattcatcctaccttgaaactagcaaacttttcaagtcgcttggcttggtatacatagcatagaaatcaaataaatcaaattgttaaaaatacggagcgcaacaaaaatagttaactcggggtcaaatattccctactatccaaccatcgtctgatcccagcctagggtcacgttaggaaagagtgcaaagccatacatggatagctcctattcggatatcgcccgatacataattccacaccaattggccaagacgttcttccttccgcctttttggctgagatcaaaccagggcaacgagctcacatataacatatgtgtaggtgtgggaccatcaaaagtctccatatactcataactgatttccaaatggaggaaacacatgtagtgctgtgtcgcatggatgattacaacactgccgaggtcgttagtacatagttcgaatgaataatgttcatagcgaagacattgaggctttcgatgtgtaggaatctcactctttgtcagtgttgctggctctggtcaccagcccttcgcaaaccatctgtgcaaggcttttatcggagataacaggtttctcatttcgaagactctggaattgcgtcttcgcttccaatatcgcgacatgattgtctacaagcataaaacctccgtctgatttttggcgtcgcaaacaaaggccaccatcgtcaatggccactatccgccggcggttagttattgtagtggcggcaacccgtgtcttagcgtctcggaactcgacaatagtggaccttggcgctggatgttgaggggagcgaagtataagatatgtctaatcacacatgacgcaagtcgcagagtgtcatcttctggtgttataccttgatgctgtgcatcaaggtcgagatatcctaaagatgaatcttcggaactgtgtgagctacggctactatgcgtggagccaatctggatttcgccggaattggtgaagtctgactggtctatttctcgtctgacacgcgaggactgccttcttgcaagctcgttctcatttccttcctgggtaatagataggccctgcacgcgccggtcttggttccctttgaattgggccattgctgcccagatttgtccttcagcgattccgttaccagaatttagcaccaagttgtgctcactgccagccagaagtgccaggtcgggtccttccaagaacgatgtaatttcattcgggaaaggcggcattgtcgaaggcatatatcctgataggatgggaagcagattgtgcaacggctcacgcctgaccacgcgacatgcgagcaaatgagcccgaccccaggaactggcagccacatgattcagctctgaaaaggtctttctatttttggcttgaaagcgagctctgaaggtggattcggaggtgacactgctgaaataaagagtggtagacatatttactaagtggatgtgtgagaggtttgaagaaaattgtcattttcccccgctagatgaagaaaaaggcctcgcagttgctgcctaatgcgtagcagcctaggcagagttgcgcctaacctgcccatgcctacaagttgattcgtccgattataccctgtcatcttgtctaggagcacactagacaaccagggttgtttggtgaaggcggtcagagggggttctattaggcggtgacactgtccctggcattatttccatcatcacccttgtcatcaatgctaacaatggtagctgattctgggccacagtcctttcgggatctcgtgcgaaaccataatcgctttcgctttcttgtaggtcctctacagtggacctcgtatcatctcgatctggtggggtgtcgattcgaagatgtcgcaactcccctgtctctgtcacgcttgtctctacagattattctcattacgagaagggtccacgacatcgtattcactgggatgaaattaacgatcctgaagtcttggctattggtccgcaacctgagatgaagcgtgagcgtctgatcaaaatcttggtaggcaaggattgcccatttgcacatactaggtgggagctacaggctggtagtatgaccaatatacccggggtaactgacaacttcaccgagcagcaagggacctcctttcttttttgatcgtcggtctattcaccggccagaatatctcatgtttcataacagtcaagaatcgatcgaggatccctcacgctcattattgggctatgtgcactacacatttgtcaatggatctcgcaatcggcaatatcgtccagctccagggggacgtagcaacgagatcggttggagaatccatctaaagcggaaagctcggacaactccaaaggaatggaccgacgatccatattttgtgtgtcatttgttggctcttgcgcagctaaaagaccgcaaccgcaccgtcaatccatcaaaaccaatcacttacactgtatgttctgtatgcttacattttattggtctatcgcgtcccagctaatttgctccagtcacgtcttctcgcgactcacatacatgaaaaacattttatcatactctatgaggcccagatcactaccgaggtcctgaatgcgctcagtcattggagggatgcaacaacccccatccaatggcctacaattaagcgcaaaagaatcccatatcagccttatgatacgtttgctagccggcttatagcggagataggggaatctaggccttccgacagtctgtcaaatatatcagatggtgtggatagtgtggatgagcacggtgggaaacggccatacgaaccagaagatagcgggtcatccaagatgacgaggacttcaaaagaggcgggtctataaggagacctgggggtagcaaattcatcggcataatggactttcttcggatggacaattttgggggcgtttcaggggcgttgtatcaatatttttcatgttctgagcatgagtgatgactatgtagtattctttcaaacagctaacctgtgtttattcttgatacatgactctctcgttcacaaagtttgcataccttgtcaatccttagcacatttttcataacacatttcatcctaaacaatcaagtagttattgcgaagagcttgttgatggtattgatttccgagtaactaaggcacttcatcaaaaaaaaaaatatgataaactatcacaacctcggtatgaagatcaaagcaaaacgatcaaataccgtgatagccaagataaaacaaagctaattaaggacatggctcattcaccaaagccgagagacaagcgtccaccgccccatttaagcagccgtagtcgaggaactcgaggaactcgaggaactgccagaggaagcaccgtcgtcgggaggggccccactaccaccaccggcaccagcattctcattctcaacaccaccgtcctcagtataataagccgcaggggtaacagtggtatcctgtgtagggtccaaaccaacagtgatccaagcgaaaattccctcggagatatcgtcgcccagatagatgtattccatgaaggggtcaatgacgtcgagctcttcgccgagaatgctgtcgtcggcgttggtggtcacttcctgtgtgttggttgagtaaggggcgacttcgtcggcggcggtgatgagatcctggtcgaagaagatctgtccgacgtgcgatgaatgcgtggtgtagaggccggagatggtgccgttggcgaggactctggtttcgttggctgggtgggcgagaactatgtgtttgttagtattggaattggcttaactaaggggaattgtgtataccgtggatgtgagttgcccggccagtgtaatgacctgggaaggttgtttggaactgaacgacaccgtccctgttactcttctggatacctcggttgaaggtcgtgtcgaggttggtggaatcgttggagtttccgtttccgctggcgacgactccagaatagacaccctatgatgatcgtgtaagtgaaaggttcgtattgtatgtgatatcggggatgcagtatacttacagtggagttgcagtgccacaagtctgtgtagagctgcggaatgggttcgcaggtgttggtgttgatcagctggatgtccaggtagagaggaataccttcctgggactcggcgatgttcttacgaacgagctcaccggtgacatctaaaccgaaacagcgtgagtaagattcaatcacaagaaagatgggaagctaacagtagggtccctgtgtcacctccggtccgagaatgcatgtcgcctcggcgccaaacaacaattcgggatcggtcgaataatccacactcgtgagattggagtgatgcgaggtatccagggcgtcatcggagcgcgccttgaggaagtggttggctatgggtcgttagaacgtggtagtatgttgaagacttcaaaacacaaaacatactatgctgaagaccaaggcggcgacgtatgttcttcacggatgtgtgacgacgggccacgtttcggctttggtggcctcgacgctggagatgagaggtacactgcgcaaggctgcgcgagtgaacagaggcctctttcaagaacgcagctcgctcggcggcttcggctttgacatcatgtcccgggtgagcggagacaatgccggtcagagcagtcaggccgacggcaacaatggaagcgagatgaaccatgattgcgttatcgaggcagttgaaggtgaatgagaatgaggaagttgaggataccacagatgggtgtcctggggtgttttataccccttcctgttgcctccctggctaataccaaggcggagcatggctagattcaggatatacccgcttcaggtaaaacaacattttgatgaagctgacgagggatatggcgcagtactgggtccgcattgacaaatgaaacgctgcaagtttctcatcgagaaagagatctaggtaactgcggccccctcagcggagctccgattggattccgatgctacatggcgacaggctgcaattgcgtgccgttgataggacatgcgtagactgtgaaagaggcagatgtttagttcggcactaactctaacccgctgatgaatccaccgtcgatcatcctggaactattgccctgccaaggaggaaatcagccagtgaggatttcgcaatttatcatgcggggaattaaggacgcggccctatgatgatcttctttcagtcttcgtcgcagggtgcagatgtatacgtattcggtcttggcggtcccgtcccggggtcccctgcgagatcagtcagcggagaaaggagcgccgatagctttggctgcatatttgtgcgaaagatcaacaatgaacttgtcggactccgagattgctgccggaaagcgtcggatttggatgcatgcaagacaagacacatgtgccaagctttgccttctaaagaatgcatttcccgttatacttgagctgttcggaccttgaatcttgccaaggcgatgacataattccggaaaggcttggcgattgcttgctctccgaagatctaccgatggctgagtgtggctggtggataaatgtgggttccaaccctatgttgagaatacggagtagctcaactggggtattatcaataattcctatgtcaaaatggtcagtatcaagtataaataggttggtgcctaggtgcatggtagaaggagagaatggaaggactattcgttggttaagtatcaaagtaagtgtagtaggaataaggacacccagtggcctagttggtaactctatcgagcagcacctgctctagacaaccctctaggtcaactgcctggtttagaacactgtcgagaattacgcactcacggctctgggttcaaaccgtttgtccacttttttttaatccttttttttttctcgttccctatattagttcctgaagtatcaagaagtaaaaaaccagcaaacagccgttgtttaagtatcaaagtcaatgtaatagtagcgaaccccagtggcctagtcgatcatgagccatacctgctctaaatcactctctaggtcaactacctgagtttgaatctcctagaccgcgagtcgctgtcgagaacttcgcactcttgttcttttttttccagtatcagtttccgacaaaccttagccttgaaagcatacaggtatgcgatagttaaataatgcctacgaggattaagagaaaaattgtatcaaaaactatcagaattaattccatcatgttaaatgcatattcgtagatattgaagcaatatcgcgttaaaccgtcagctcatgatagagaaataactgaagcaaggccagccaagagggctgggacaacgtaaatggtaggaaacaagagaaccactacgcagaaacagtccgatggattaaacctcctgctgactcacggtagggttaatcttctcgtccaatccaatttcggcagcaaaggtgctgtgaggctgccacttggaggaagtacgaggagtagtctcttccatcatcttgtcaacctgctcaagggtcagacccttggtctcgggaatgaggaagtaggtgtagacaaaggcgcaggtacacagcgaaccccagatgaagaacaccttggcacccaggttacccttgtcggcatccgtcatgtaaggagtgatgactgcgatgatgcagttccagagccagttggaggcggcggagagggcaacgccgcgggatcggataggcagagggaagatttcaccgatgacgacccaagcgccggggccccaggtgctggcaaagaagaagatgtagatgcaaatgaaagcgatcattgcactgacggccttggggttgttgccatcggtaacaccaataatggcgacaatgaactggcacacaaccatacccagggcaccccagaggagcaaaggacgacgaccgtatctctcgatggcgtagaaggagagcggagtggagaagacattgacaatagtggtgatcatgctgatcaggaaggggtccttgattgtgccgagttccttgaagaaagtggttccgaagtagaaaatgaagttgacaccagtccacctatggatcattagttcctgttcaataccagggggaaggtgagacatactgctgcatcatctgtagcgaagtacccaggatagtacgacgaaggttgctattagggtgccaaaggcttccagtgaagcagttgaaccaggtgacgaagtatccaccctgggggattaccaaaagttcgtactggttgttggcgtcgatctcattcagctccatctcgacaaagtccgaatcttctggctggccacggatacgagccagtacaacgcgagccttatccttctgacccttgcggataaagaatcgaggggattcaggcagcaggaacaatccaaaggccaagataacagcccagagcatttggaggccaatggggatccggtacgacccactgtctgtacggttttgggtaccatagttcacgcacgaggctagcatcaaaccaatggtgatgcagaactggtaacccgagacaagagcaccacggaccttgcggggtgcaatctcagacatgtagagaatgatgatagccgagacaaatccgataccgaaaccggaaatgagacgaccggcaacgagaagcccaatgctggttgaagcggtctgtaggatgacaccgacgatgaagatagcgcagccagcgatgatagtaacccgacgaccgaaccaatcagccagatcacccgcgatgagcgcaccgaagaaggttccagcggagagaatggagacaatgagcgactttcgggaggacgggatgacgaattgtgctgcatcagtagtagcaggatcctagtcggttagtgggatactagtaacttggagacattgacactcacgaggccttcaaactcttggatgaagtagtccatgccgagaacaccgctgatgtaaccagagtcataaccgaagaagataccaccaaaggcagcaaaggcacacattaagtaggccttgaatgtgaccggggcctcgacgcgcgtggcgtcgatgggcccagagatgactgctccacctggcatggtagcaagtcgataagagtagatgtggttaagatatctagaaagagatgaagtgggatgtttcaaaataagataatgtgagatgagaggtgggaagaagaagaggaaaggaagggattgggaaggaagagagaatttatattctggggaagacagctacttgagctccaaccccggacctacccccatgtctgaaaaaaaaaacacaaacaaaccaaaacactacagggaaacattaaaaaccagtccaatccacatttggtttgggtgctgcataaaataccagaaatctagaaatcggctggaatgacctgtgtagccaagtcggctctggaagttgaccacgcgatcgaaacggcaagtatagaaaaccggggaagtgttgcacggcctaagccgtaaacctgtcagattggaggctctgattggctggaatccccagaaatgatccgccgatccccccagggctggacaagtgaaaaatacccacaaaacacactaaaaacattaaaaaacataaaaaaacaccttccaaacgtccaaaaccaaacagagccgcgcgtggaaactttgaacccccggagatgtccactttgggacaatgggcccggggaaataaactctaattggctggctttcatgggacaataccccacgtgccccgcaaatactttttgtactgtgactcttacatctgggcagtcaacgggtaactatctactaagttattttactcatttactacctgggtaatactactctctgcaacattagacaatgaaaagatggcttagttatgagcccgggtgactggaaaggactgcagttcacagttcaaactactaaataaaacttaactatatccaagtcaatgtcacatcgatggcaagccatccaaagcacagacccaatggacgccacacaatcccactctccactttaccttaaaggaaaaaaagtcttggcgtcaggcaagctgactatgcaaggatggcggtgtatacagtaagatacagcacgttacaagaatgttaggcttactgctttacaatccaaagggggtatgttcctagccatgtctagaaagaagcaaaacaaaaacaagaccatgctcaacatagtcgaagtgccagctcgtctatcaaacataagattcccgaggacagaaatgggcttttgaggctttcgcccacggggaaaccaaccagttacacgtgggagactatacctgtttcagttctcatctccgcattctggcttggctatcacgtgaagtcggttttagtctgaatgagcgggctattgtcgggacttcgtgctggtccattagctgcctcgcgttgtctcaatggcgcacttgatcgtggcatgctattcgatatcacaaactgtgactctactaaacaaactctcccctgctacccaccaaactctggaatggctaaatacagccaatgctacctcgtgctcgtactcggcttacggggtacagagttgatagacaacttgccatatgttgtctttgaaatggcatgagtgacccactttggacatacgatggagacggaagttggatggtgaactaggattctccgaccgaaaaaatgagaaaacagaggaagccgaggaagaatctccgatgccggtgaacactttccgtaatgggcggtttgtgtttcacttgaggggaaaatgtccatgcacgagatcgagtccggagtaagacgtacctatgccctactccatactcattgaggatatgcagatttttcggatctagcggcttcgggttagtcgcctgggcacgtatagatctggtatgttattacctacgtacatcaatatcctctttgggattctgatacatggcctcgaccatgattcgtggactcccgttttttcccttggtcgaatctgacaccttttggctaccaattgcattttgattgtcctacgttgtactcgttcagggatctctagtcggttgcacctgcgtcaagactcgattcctacagaaacaggtaccaggtacaatcttcattcccaataaacgaaactctccgtgtgaacatgccaaaactacgcgccatgtcgggcctgaatatcaagcccggccaacccgcccgtctgccgccaatcttcaatctccttcacataactcttaatcccctctccccagatactgaactgcgccgcccgcaaggcttcaccgtcgtcaaattggagtccctcccgattgaagtaccccggagtgcaatccatcacacctctgagcgctcgggctctcatcaaaaccttcgaagtccattcctcttcggagcgacagtccggctcaatagtaagcccgggcacggtgacatctgggtttcgctccgagatcaacttgccggcttccgaaatgatgtaggcgacatgaacggcaagctgatcgagaacatagacctggttcgctgatgctcctgcttgatacggacctgggaagaacagattgggaaacccattggtcattactccatggagtgaagtcatgcccttctgccatttttccggcaggatctggttgtcacgtccggtgacggtcatagccccgcgatcggcactacccccaagactgtagccggttccgaaaatgatggtgtccaggtcatactcttggccctctaccaagatgcctttctctgtcacagtccggatcccttttccgttcgtgtccaccagggaaacgtcgggccggttgaatgccgggagaaagttgtcgctgaagcatggccgcttgcaccatccaggataccacggcttcaaagcactagcagtagcgggatcggccacagtggtttccacgcgatggcggatcgcctcttggcgttgcaagtccaattgatgcatccgcgttaggtagtccgggtcaagaccggagggactgccgatcagtacaccgagggactgcatcttggtccaaccatcatcgacaaggtcaacatctgggaggggactctcgttcgagcagaaggcattgaaattctccatgcgctttcgttgccaaccggggcctcctttgatcagtttcgcccaccaggtgcgatcggtgaggtgattgtaacgcgaatccacagaagacggtgtgcgctgaaagacaatcaatttctttgcccacccggcaaggtgtgggatcacctggacggcagatgcgcccgttccgacaaatccaactgtcttgtctcgtagtccatccatcatcgggctgtctggacttccgccggtgtaatcatagtcccagcgcgaggtgtggaaaaccttcccctcgaacgtctcaagcccgtccaatttcggtatcttcggtgaactcagcaacccagtagccaagataacaaaatcagactgtatcgcagtggatcgctggccacgaggtttaatattgacagtccattgagaatcccgctcattccaaaccaagttatcgacctcggtctggaacaaagcccgctggctgagcttccattgactggcaatgcgcttcgcgtgtcgcctcaattccgacccgctgacatacttatgcggcggcatgtacttcgtttcctctagcaagggcatgtaagtgtagctctcgacatcgcagaccaagccggggtatttgttccaccaccacgttcctccaaagccacctgctgcatccacgaagaggatttcactcgcacggaggaatccagattggagcagtcgcactgcgaatagcagacctccgaacccagcaccgacgatgaggactcgggtttgcctctgctggagcatatcggtgttgacgacgatgaattcgttcaagtaggcggggtcatcggtcaagtcaacatattgggttggtccgtcagggcgtaggcgtttcttacgttctgcatcatactggtcttgtatattctgcagatcgtcgcttgtctcagctatactggctatgttggtggtaggttgatcaggaacaggaggcgctaggccaaccacagatttctcggacatcatgacaaggtgatggaaaataaatctctacatgtaaccgagcaagacgaatagggggttataaatgccatcgagagcttcaaacagatacaagatgtttagcaatcggttgtgttgatagtttctagcaaacggaaagcagagcaaacgaagaaaaagaactgggcgtatttaggagatacatacgtattacgtataataagtaagctatagttaaattccgaacgcaaggggccatacagacccgtttggaactcaatccaagagctacgctgaaccctcgtgcatattaaaatgggaccggctgtggattcaccgtgataggtagggtatagggatagactgtaacaagccgcagcgagaaggcgtccgcactgtgcctcgtttactctagcacttcagaaccagagggtagaatgttattactgcggactgtaaattataggacgttaatgttatctgagccaaaacgaaaataaatgtgattggatgttatctgatattagcaatttggacccaggcctacattctcctccttagctggtcaaaggttcctcgaactcaatctacatcccagtggtttgcatgctcagtgttggactggggtagtagtgtcctccgcggttcctcagggataccattctcaccgtccccttcgtcctgcacctccggttgtaaaatacgctgataaccagacctcctgttgacagatcctgtgctcatccaactcatccgatgactggaaatccgaacgaaagcaatctgtacaaagtcgcagaatattagccactacaccacaacacaaatctcactatatcgtatgcagaaacccaccttagccgcgagaacaaaaacagccgccgcaaaaaccatccaagacgtccgctgctggtactccctccacggggcaaagcaactcctctgatatcccaactgcaactcacacgcattgtccccgtgggtgcggtccttgaaaggccatgccctgtcgtgaatacttctgagaccacagcattggagctcatcctggattgaccggatagcctgtgagttcttcgacttgaaaaacccctgccattgttgctccaggttacaagagaggatcctatcggggaagaggtacgcgagtgctaatgtggccacgatggtcgatatggctgtttgggcgtgattgagtatacccgatattgtgttccattgatgattgtgagctgtgtcgttgtttaaacgtgtaaaaaggattcgtgtggctatcagtgtgagtattgtggtcggggaatttaaggtcgcgagggctggaacccatgttggcaaagggagaagcaatgcggaggtgcgagcccaagataacctattccgatgttagttattctcgttgattacatgctagttggagatatgatgaagaaggtagtaactcacgctccaaggaccaaggagatggtcactccctagtggtgaggtttgtcaatagaggtcatcgccaggctggtattcaatatcttaccgcaatgaaaatgacatagagaagaacggttgtatctaacttgaccggcattattgtatatttagtcagatgttttagtcgatgcttgattgaaagaagaagaagaagaagtggacgacatgggcggggtaggaagcggtatagctacagagcataagtaccttatttgaggtaccttgcttttcaggaagaatgtgcttcatctcctttctattgagagtttgaaagtgatatcttattcttttacttgttgcagtctccgcaaatttgggcaacagtagtaacacgaatcgatgttctattacttaaatcctcgatgctatgtcaaccctatagtgcagacatcatatatcccacaggcgagtaattgatagcgatagtgcatgatcttcgtaagccactaccaggcctaagcccgaccagcaagttccttttcgtgcatgggctggacctcctctatcgtaggcacagtatccaatgcgtcgaggatgtcagcgcgaggaccggtgaagttctttcttccatccacaaaccactggaacacggagatgatgataataacagcaaatgctgcaatgcagtagtctatatagaaaggttagtacgaaaaatgtcatagataacctcgcaggttactcactcatactgcttcccgtgaccgtgcttgacggagggaagacgaaaaggacggtagtcaaagcgatatatgataaagcgacctaatcatgattagagatgttcggcttcattcaaattccctggcaacatacaatgtcgacaaaccatccaactgcattaggcaatttccattttctttccgggagcgatttgcgcccctgaagacagttgatggcaatagggattccgtaggacaggtcaagagccacgaccgaggcagagataattgcgttgaacgcactagactctgttagttactattgcgctatcgtgggtgatgatgattaccttgaagagccgaggaagatgcatccgaatgcaatgaccacaacaacactaagaatgagtgcgttgaggggcaatttgagtgttgggtggacctttgcaaagaaccgagaggcaggaaggcctccatctctgtgaagagtcagtatacgcattgtatgccaggaagaatatcaaataccttgcaaatgcaaagatcattcggctactggtggtcatgacgctgattatagcaaagaccaagcagaccaggggcaacctataacctcacgtcagtggaagcacaacaggggaaattttcaccacgtacatcaaaaggcagataccacccgcgttgctcttggtcgcatcgatgaggatctgcagaagaggaccggctgcggaggatgcgaccgtttgcatgtttcctgcgacgaatagaaggacgatcaaaaagatacaaccggtgaagactccgatacccacgcaggtaaccatgattttcggtccctcgatgtcggcattgggcacctctagaaacgcgtgtcagtccctctccctaacttctcaaacccagagtaatctttaccttcgatcatgtgtgccacagcatcctagatagtgttagttgaattggtttagtatcgcaatgaccatgacttacaaaggcagtaacgccaagccctccttgaagcaactggatatatgttagtatcattgcatcgttacaatggatgcagtaaacatacacctagaagccatgcgactccatcaggccctaagctgaattagcaaaatcatcataatagagttatcggggagcatacagccggttgtattgacaaagtcacagaacacgaagctgtggatgtcagtagtctgtcataacttgatactgctgaggatctcatactaagctgtgttgtagttgggagaagcgcatgcgagacatgtaattgacacaatcacaaaccctccaatcgaccacatgactacatatattgttagcgatagcaagtcaagctgggagaggtaacccacaagcaccgcggtaaatgagcggcaagatggagttcatgaaggcattgatgatgaaggaaccgacggtcaatccaacgtagatgaggaattgatgccagcgttgtgggacatagctctgcatatcatgttagcattgtaggaagagtatggagtgagcctctaacctcatgaagaaccgagatgatgccgacaataagttgactggagagaagggagttcgtagcgacgagtgcaacctggttgtgtgttaggttgagtaccacattgaatgattgccttgcctacccagcctgccacattgatccagcctgtaacccatgataggattgggactgtgctcggccacgcgacttcgattcgttagtatgaagtatgacgaggtataggaggggaacatactggctagtaacagagttagggttagtccaggtcatatagcataaagggtctgtagggataggatgactcacctgctacccaatgatattgtccaccggctctgcaaaaggatcagctggtaatataccaaaaggggacatgccggagcttacgtaggatatgccgaaagaaattcagccaacgaacatgcgatacaaagattgcagaatcctgcagtaaccagtcctggatgcgtgtcagcgaggtagaaaccaagtatttctaaccaacgtaccccaaatcacactggtacttccaccagatgtaagactgatcgacaaactggccgaaagcgcagtccacgactagcttggttagccaaatatcccggtcgcaatccaggtctgacatacattaagaaccgcaaaggccagaccaagcatcgacctagagagtcctgtcagtatcaagcctgcatatgctagcgcatcccttaccatgtcgaatgactacgttggagttcaggcttatggcccaaagccgccaacttggcatcatcgccttggagtgaatcgtccttcatactggataccggtttccgacgtgaatatttacaaatctaagaactgaggagaagacgatcgctctaagtacgtcccccgttcacacgtatcaggaaggcattgccagacgggttctctttacggttaagctccgataggggattgactattccatatgcggggaagctgtgtagctgcaaagtatcttatcgaggaggcttgacaggcttgggaggcttatcaagagagtttatacgctaggctgctagtcgatgtcgcatggacttgcccaacatcgtatagtctcgccaccggcaattaaaacaacggcaaaattgggcctttaaattaattcttccattcaatcgagggagcttagtaaaatataatgcatcatattgtacaatccaatttcgagatgtcaacgttaagttgctatcttgcaggaatcaggtccccgccttaattaattaattaaatctcaaatagaacataatgccacgtgactatgtttgcttatttgctatatctttatcaactgcttcatcattaaggggctaaatccaatgggaatcaggtagaattacctaccatggagtgccgtttaggcccgtgtgtttgagttaaagcctgctccgttttcttttttttataaatccacctatacttatttctacctactaaagagggaaccctgcaacggggacagtaggggcaccgacatctctgcctgcaaaacaggtgtgagaggagagttatcactgggagttgtagggtgctagagaggagaacaccatggggtgactactgagaagtgaattggaaaggtgtctgcctctcacatggccgcttaatcgtcctacactggaaacccccactgcactacatatgtagtccgcttacaggaatccagcaagaatgataatttcaagtggaccgagcgacctgtgtctgattgtacagctgaatgatgggtttggtgccactattacattagctgaaaatgtcgagagcaagactggttggacggaccgaagacggtgcgatgaatgtggagtcgatgaaggtattgcccagcgtgaggatgcctcaaaggtgtaacgatgaggctcacagatccccccgctgagtgtagaaggtcgatcagaagatgtatgtttttggtaagaaaacagtggcagcatgctgttgaaggcttatcgcgtctttggaaggatccacagggagcagatcaggaaaagcagccttgattgatataaaagaagagaagctagagaagcagagatctgggagaaatggaagaggcagggtcaccttcattaccctcaccttcatttaccttcatccttactgttacgattcactcgtcatactcctgtttgcctatttgcttgattgcttgttcgctagttcgcattagctagattgttcgctagatagaagtttgcattgtttgtaaaggggatagctatattaactagctgctttctactttacaatttgcttcttctttctccctatcttagttatttcgaagttatttcgagtagaatgcactctgcttcctttgcaagatctggcacgtcacacttaccttcatccttaccttcatcaccaattcttcatcgacctttaccagccttgccatcgtttttgctagatagctaggtatctatgtgtcgtcgtagtaaagtttacagacaggcacgcccgccacctccttttgaagaagataaggcccaagtgcaagctacctagggtgtcctttgcctagattgtcgtcaattcaagcttcgatcacatagctgtgacccagtttgccaaacctgcggcgatcattttaccccacagactggctgtccagatttgtgtgatgctgctccctgctgtggctgttgcattaagaaacttattgatgaatcgtctgaatcttttgtgatcggcgccaacgggttgccagtccagaaggtatagttatcttgctacttgtaagtagttcatacccactaatgggatttttcttcttttaggttattttccctcatttacgacccatcattgaaatacttctcgacttattctttcagagtagaccttagaggttgattttatccgtgccccctactataccttagtcaaatctgtcggaggcgtagacgcctttacggatatggtatacaatacgattttaccaggaatcagggcttcttagggcaatctttttaccatggaattgtacgttatgctatcttgcgtttcatctctctattgtggatttattctaattgccctaaacaaaaaataccccgcacatttatgataacgaagtattaggttatatatatagagtggatagttatcgagatatcacctagttgtagatatatatttcagtattttctataatcggagagaggaatgtccagccgagagtcagccctacattgttaagggacggccttgaagaaatgcaatgtacaacatacatttaataatatttggtgattgcaaagttacttcaaatgaggttataaatgtacatgatcaacctgatagcaataactccagatatgcctattctcagcgcatatagtgccttggaatccaccaaatgccaaatccgatcccaggtcccaaatccaaatcccaaactccattcaaacccaaatcgcaaatcgagcagaaaagtacatcctccagtggttcaagacgaccagcatcttgaagtacgatcttgaagtacgaatccgatgttcaatgtatcatcgagaatacgtgtcgagtgcatgttggagttcatgcaaactattcttgtcgccgtacgcgtccatcaactgttggtttcgagccaggcgctgctcttcctctagcagagcttgttcccgacgtaacttggcagcgacgtaataattgtatgctccaaaccctgcacgtgccatagttagtatggcccacaccaccccggaagaatacgcattgaacataccgagaccaattgtggccatgaaaggaatcaggctaaagtaaagcgagtcagtaaaccatcccaaaagagaaaaaaggggcggcataacgtacagccgcccattccgaggcttaaaagtggttctggttgggtttccgtatggtttgttcgcaccggggagagcaaattgagacaacatggtatatattttgtatgtcgatgttcctgggggagtatagtttggatattcaggagtatggaagtgaaaaagggaaaaaagtaaagaaaccaaggagtaaaggagcaatagagcgaaagccggcttaatggggtaacggaagagacggattgcggggaataatgacgttaagtgccgaggatcgcttcttataccgccagccctcttataccgccaggggaggggagatcatgccacgtccactgatcatcatcatacaattgtgtggtgttgtctagagcaaaagtcctacgacttggagtatgttacattgaaatcatatcataattgaatcatcgtgtcgtgtgttacctgcattcggaaaagatcaaacccgcctcgtcagtgtctcgcctataattgattgttaactgcataaattccatttgccgaagaatcatatgagaccgacggcctgaagcctgatcgtccaagtgccttaattgccgtttaattgccattgttctgaggggcaggagttgccggaccctccggggtcacataagcctaggataattcgtcagcgcaatccggggaaattaccccatacggagcatttaccttggtcattccaccatcgactacaaagtccgttccgttcacgaagctgctctcgtcgctggccaggaaaaccacagcgtgagcctgctcaatgggttcaccaaaccgaccggtggggaagtgcacctcccggcggaaccgcttggccttgtcatcacccagccagtcttgcagaagaggggtgctataccgcgtgagctaatctcacaaaaacccagtaggaaaacttactttaggggagccggacagagagcgttgaaacggaatccctcacgagcgtgaacgatcgccaactcccgagtcatcgccaggaccgcacccttactcgccgtgtacgcaagctggggagtggcggcaccaaccaaggccacgacactagctgtgttgatgatactgccacgggacttcttgtggcgacgcagactgaggacggcgtgcttgctgccgaaccagacacccttaacattaatgttctgtgtgaggtcccagatcttctcgggggtatcgatggcatctgcgtcgttggcgtgcatgattccggcgttgttgaaaatcacgtcggtgcctccccagctatcctgtgactcaaccattgcctgcacatccgattccttggacacatcacatcggatcgactcgactcgagcggtgggaaccaattccttcaccttggccagtccctttgcgagggcgggctcggagacatcggccatcaggacattggcaccctctcgggcgaagagaatactggtttcgaggccgatgccactatccaagttcggaatcggttaggcttgtgacggcattgtatttttcagggataaacaatccacatacccgcctgcacctgtgatgatggcattcttgccttggagacgtcctcggggagtagtggcagccattatgaccttatcttgagctctgtttgtataaatggaatctagattagcaatgactcaaccgccaacattacagcgtgtgatatatctatagaaaacgctagaaggaggccacccacatgaactgagaattcgaattaatatgagagttgtctatcagtgtgttgctccaaaggaatatacgcggggcacgtgggcagcgtggatcccattagataagcggtgacggtgtttgcccgaagcggtaaggcgacaccgatatccgctgataagcttccaagctgtccaggtgcgttggcctgtcgatttgcttgatttacccgatttgtctgacttggaacgagactgttatcgctttgtcccgtctttatcttgcttcccctcacctatttctatcctttggatccctatactcccaatctcactctttggccagatccatcatgtcgagccccgcagaccccgaggtcacagtcgagaatgtcgccgagatcctcaagaatgacacaaaagtgaaggtggctggagtcgatgtggatggaattctgcgcggaaaactcatgaagaaagataagttcttgtctgtcatcaccgagggcttcgggttctgctctgtgatcttcggctgggaccaacatgatgcgacgtactataaggagctggccatcagcaacaagcagaacggataccgcgaccttctcgcagtcccagatttgcgcagtttccgtcgcatcccttgggagaacaatgtgcccttcttcctcatcagcttcttggatccagagacacgggagccggtgtgcgcctgtccacgaggattaataaagactgcggctgccaaagccgaggcggcgggctatcgggcgatggcaggaggtatgtccgatcgcagaccagggtgtgtgagattcaatggctgatcaggatattacccagcggaatatgaattctaccaatttcgcacgccgggcaaccatgtcacccccgagcaaggcgcatctgcaacagccgccttcctcaagtcgaatccagtcgatgcattgccgccagtgacagaaggcatgtttggttattcaatcactcggcccctccacaaccaagattactattatggcattttcgacgcctgtgagaagttccgatgcgatattgaagggtggcatactgaaagtggaccaggagtctatgaagctgttagtgccatgatagtacacggtcgtattgggactaaacattgtgataggcactacaatttggcgaagcaaaggacatggctgacaaggcggggttgttcaagtgggtttgttcctttgctagtgcgggctgggccagctaacttgttataggtacgtcgtcaaatcattcggaatcaagcatggcattaccccatgcttcatggccaaaccccgacaaggcctgccagggaacagcggacacatgcacatctcgctcgtcacggccgacgggaagaatgccttcattcgtgataccccggatccatccccgctctaccccgatatcgctcatctatccgacttgggtcgacacttccttgctggccttctcgtcggcctaccggatatcatgccgatcttggccccgacgatcaattcctacaaacgcctggtggagaacttctgggcgccggtcacagtctcctggggactggagcaccgggccgcatcaatccgtctgattaccccaccgacagctagtccgaaagcgaccaggtttgaggtgcgagtgccgggtgcggacaccaatgcgcatctcgtcctggcggcgatcctagcattgggatggcgcggagtcgagaagaagctcgagattcccttgccgcctcttgctcgcggcgaggatatgggcggtgccagtgacaagggtgtgcgtctggccaaatccttgaaagaggcggtcgttacatttacgcgaccggagagtatcgcacgagaagtgtttggcgatttattcgtcgatcactttgccggaactcgggaacacgaggtgcgcttgtgggaggaggcggtgactgattggtatgtgacatcattaccccgtactcattcgtatactgacaagttcacagggagatgaagcgatacatcgagaccgtgtaaatgccgtatttcttctcatatcgatttttgatttacacagagacacgggttagcagaatgaagaattgtacatagtcgcattggcctagagattggtgaagggtgtgtaaggcacgagattagcaggcatactaccccagatatataccaaatgacattcaacgaattggaagttgtcgatttgccggagttcggatgtattctatatatatcgagttgtcacatgccgatgaacacagggtgacgcagaaaaccgccgggacaactcggcttcggatgtgacactctgaaccctgcgagatatgggcgatcagagacaaccgcggttgattggagtttccggggaatgcggagagcttctactccgtacagccactttcgggtgaagcagggggcgaattgtgcaaagcttgctattacccttctttattatcattctaaacaacggtcaagctgtagaactgtgttcttcgaaagataccgacgtggacagcctaatcagactcggtgtgcggcgtacgccgttctaattgcgatcgtgtatagaactaatataagcttaaaaggtgaagatcgggaaatgtcggccgagaggaagagtttcccgtggaaaacccatgaaaagtcgtccatcgaacgcgtttcggtatcagaaagacacagaagagtcgggaaattataagaagcgacacggtcaaacggggaaaatgggggacaatcggctttccggcttatcattgggcgggtccagaacaaccgcggcaacttttgggtgactctgacgtattcgataccctcgggcagatggctatataggaacaatatcactcaggcttttcctgctttctgctctgtggaatttgaaaattgacgttctatacatggaataatactgcacacactacccatctacatattccatacacatacgtcatgtctttcgtcgaaacacagctcaaggatgtcgctatcctaggcgccatcaacaacgatgctcgcaagatcctgaccaaggaggcatgtgccttcttggctatgctgcaccgcaccttcaaccctacccgcaaagctcttctgcagcgccgtgtcgagcgccaggccgagcttgataagggaaacctcctcgacttcctccccgagactaagcacatccgtgagaatgacgcatggaagggtgctcctcccgcccccggtctcgtcgaccgtcgtgttgagattaccggccccactgaccgcaagatggtcgtgaacgccttgaactccgatgtctggacttacatggccgattttgaggattccagcgcccccacctgggacaacatggtcaacggccaggtcaacttgtacgacgctatccgtcgccaggtcgacttcaagcagggagagaaggagtacaagctccgcactgaccgcaccttgcccactctgattgcccgtgcccgtggctggcacctcgaggagaagcacttcaccgtgaacggcgagcccatctccggcagtctgttcgatttcggtctgtacttcttccacaacgccaaggagctcgtcgcccgcggcgccggtccttacttctacctccccaagatggagtcccacttggaggctcgtctctggaacgacgtcttcaacctgtcccaggacttcgtcggtctgccccgcggaaccatccgtggaaccgtcctcatcgagaccatcaccgccgcgttcgagatggacgagatcatctacgagctccgcgatcacagctccggtctcaactgcggccgctgggattacatcttctccttcatcaagaaattccgcaaccaccccaacttcgtcctccccgaccgctctgacgtcaccatgaccgtacccttcatggacgcctacgtgaagctcctcatcaagacctgccaccgtcgtggcgtccacgccatgggcggcatggccgcacagatccccatcaagaacgaccccgccgccaacgacaaggccatggagagcgtccgcgccgacaagctgcgcgaagtgcgcgccggccacgacggcacctgggttgcccaccccgccctggcccacattgcctccgacgtgttcaacacctacatgcccacacccaaccagctcttcatccgccgtgaggaagtgcacatcaccgccaacgacctcctcaacaccaacgtccccggcaagatcaccgaggaaggcatccgcaagaacctgaacatcggcctcagctacatggagggctggctccgcggtgtcggctgcgtgcccatcaactacctcatggaagacgccgccacagccgaggtctcccgcagccagctgtggcagtggacccgccacaacgtcctcactgccgagggcaagcgcatggacaaagccttcgcgctgcgtctgctgcaggagcaggctgatagccttgctgctcagggtgccaagggcaacaagtaccagcttgctgctcgctacttcgctggccaggttaccggtgaggattacgccgatttcttgaccagcttgctgtacaatgagatctcctctgctggtagtgctgctaagctttgaatgggctttaattttatgatgatgaataccctttgtttatttttgtctggtcttgactttatcgccagattaccatctgcagttagcatagttgtataaaatttattttattccgattacttttaccagtatttcgatgagttatttcgttgtagtagatgaattgctaggattccatttcccaccattctcttacaaccgacagcgccgccgttagtcgaggacctcggcaattagacggcattcgaatagaccgcactttaggtcaatatattccgagacgaatatttcgcatacaggcagtgcttacggcaacttataattctcaataatctacgaagataaaaagaaagatatatcgggtcatgtgattaaagcaatatgcgagacccccttgtttcagtttgtagccaaatccagtccaagaatcattccttcctcatattccgacaaaaaagaaatgtcctctcgctttttagatctctctggagataccatcctccaagagcaagtccttggatgtggatcttcagcggttgtagttctgcgtgacggcctagccgtcaaaacacccctaagatatatttggagctcagatatcgacagatatcgaggttcagatgaatattgaagtcatccaacgtgaacaagatgtctatcgtcggtttcaagaatctaatacccaatgtggcggtattgttaactgccttggtttcttaagagaagctacctagctcacttatatggcaaatggcgatcttcgcacctacttagcaaccaaaagaccacctcaacagctccaactttcatggtttcgcgatatggctcgcgcgctcgagtatatccacgatcgacgtgtgcttgtggcagatattgcgagtcgaaacttccttctcgattcagatctaacaatcaaattctgcgatttctccgaagcatctcttctacccttggataccgatatggattctgtcgatgacaacggatacacagctcgaatagacattggctttctcggggcagttatctatgaagttgtgactggcgagaaatgcgaaatcgatctctttaaagataaccttccgagtgatggccgcgctacctggccgcggagagagttccttcccaataccgaaaatgtttggcttggatcgatcattgaagactgctgcgtcgacgggggatttcgaaatgcgcatagcttgctacgagcactagattcaatcactctatattccccaagccccaaatctttatatgatcgaccttcattgacagaatttatccaaaacttggtcgatgggcggtcgattgtaagactggcagtcatcctcggtgccttgggtacgttcgccctatatatgaatagaaaacagctgtcaatgtcttgataatctatgtgcttgatgttctatattttgtttcggatcgctacttcggctgataatatccctctctctggttattcttctgtcaagcatcaacaccggtacgccaagagactatttcagtctattatacctctccctcgctcgcgtacttgtttttgcgataaggtcccaatccaagcttcaacgtcgaaaaatctcacataccaccaaagtcggtggtaaaaaaggtgaccgtgattcaggtggatcaattcggtagcctatgcataatatgggtgacttgatagagaaaatatttatactaacgtcgttgacttgatgttttgcaataggccctcgtatatgcgtgtccgacatgacggcagggggatgcctatcagttaggcaactggacaccgtagcaaaaacattcaatattgtcatcaaagagggttgtttgggcgaagagaagatggatcaaggaggggtagggtaggcacgttgtgcgtgcatgtagatatatcgcctgacattgaaattaggcccctcctactacccctcgccaacaccaatctagaaatattctagtttaaatcgacaggttgattatctcaaggtaagtgacaaaaacactcgaatgatggctaggccaacccttcaccaggaatccacattatgatccacaaagatcttcctccttcggtcgaatccatccgcagaatcatgaaggaactgatgcctgaaactgctacatcaccgaataaactagccgaaaaccaagcagcgatatttcacgaaaacaaaaatggaaacaaagcatatcggggagacttactcgcgaaacaaatctctcttctcacgatacaactccgcgtcacggaaaagctgcaaatcggtactgtatgtccattgattatcatttactttgcagacaacggactcatcagaatataggattggcgatggcatttagtgcatttttcgaaagataccaaacttgagaacgttcggaaggaaggttacttgatcgtattatccaataccatcaccataacgcctggaggagtactcaaagagggatcatacatctatatcatcaatgagcctgtcataagtgcaggggcaactgccatatttattgttcctccgcctcttgactaggtaggacgtgggtacttctatttagcttatgtgtactccgtacatacactttgatgtgttctttcggggttcagactggcaattatttatctctgtaaattactgagaattgtatcatcgaagaaagaaattctcaggttgacgaaataggctcagagaaagacgactcaacacaactcccaccttcgccaaataaagccgatatccacggcgtagcaacagaggttggttgtatttcgggtccctgaaccgttctcgaaattggggtcattgcgttctcgagtccagccatggctcgatcatcttgataggggaggtagtccatcgacagggaatcctcaaaaaggttgtatgaggtctcggccacagcctgatcgtcttgaaagggaaagtggtgcggtcctccgatgggctgggattcctggtttgtctcaccgttcaaattgcttctagattatgcttctaatcgtatcgaagcacccggagacataatgatacgagcatggcgatgcagtggttcatatcggatgggggagtttttaattcccaattcgggttacacatatatattgtatagttgcgattccccgactgtaactgaaatttcctgcttaatgcgagaaacaatgccagtatgcccggagacttgtatctcgcggaggggcagtcgcggactggtgcccaacatcagcgctccccgcatcaaaaagcggagtcatgtgacgtcatgtgactatgttcacgagtcaagcctttgacgtacttcacgtatttcaccagtatccacctcagtttcgacaattataattagccaaacgatactctccacctacaatcacgcgaattccctaatacccaggtaccccctaaaccaggcgatccaaagagggtggtgtagagcatggttgaagtacagccaagggaaatcgttagtatcgtaagatgtaaggagcggacgacaatttgattcatgggactgcaagtctttcgcggaacccaggggttgtcgtaatatacaccagagaccgatgagcctggacgcacggtctgctgtaatgtaaccctaatgtgctatatagttagctcgatcgccatgggagaggctaaaagcccgggattcacgccactgtctcaggattgctcaaactaccatgacccacacgccatttcgcatgagaacaatacgcatgggatcgatattccactgcgctatgaatctttctgtacatctgggacggttcctactaaattcgaaacatgatcttgctcgcagctttatagctcatatcccgaaagctaggtgtaaatggcggaccctgataaagtccggattgtatgtatgacgaatgtattcctgcagcctacaatggagccaaatccctgccctagcccattccttccatcatgcaatgttactttttgaacgtgtccgatactaaataatgagttagctttgaactaagacattatgtgatctgctcttaattgtgctataagtcgacaaattcccctgtctaaaagctcgaatcgtataagagagaaagacaattgcctaagaatatccttcaaccggtatggagtcttatttacaccgaactcttgagagattattgaccccgctctctgttttccagcgcccagtggacctctatgatgttaccgaaaagcttctttggatctttattccttgcggtaacaactgtttcaaccttcgcaatgtcaacagcccgttacacagtaccaattcacgaatcgatccaaattttggagactcgtcaacaactgaatgatatggcgaggcaatacccactcggaactatggacgacaggaatggaggctattatctcttagactatgatgataccgttctagctatcgcatctgatcccctatgtgaagaactggatgctgcaatcgaggcagcagaacggtaccgcagcgcccattccgaaatcgacgatgaaagcgaattcgctacacctacctcaaagtgacagggacaggcacactctgacctgtctaagcgttcttgtacccatccatgctgcaacgcatatgcccgctgtcggacctacagctattgccacgtgtgcgctagaagctatcgttagtgtttctgagcaggtcggagactaggctgatacggaaactctacatgttgacctcaattgtttagaactgctcaaaaccagagcaaaattcaaattcggcgagcttcaaaatcctttcaaattattcgagtcctttcttctattttattcgtgtatatgatgaaccataattgtggatgacacctatgtatatcaactgcagcttcacatattagttattcttctgtttatatagctagtaaaatcgctctctatatcctccacagaatggtacttaatgatgaatctctatacagaaagagacggtggcatttactatagaaaggggcggacccagagaaagactgaaggaaatagggattaagtgttactattcgccacgttcctcgttgttcttctcatcaaagcaaatacacagagccgcgattaatgctgcatccacaccaggtgccacaacaacggcgtaggtctgctggccaaacacaaggtcacggccgctaagcaatttccggtcaatgcgagccaccgttttgccgcttttatggtcgacaatgtcggcagtacgatcgaaccagcctccttttatattgaaaatcaccgccttgccattactatcagtgaaagtggcggtggctttggagccaagcactggtgcagttagtaatgtgtataatatgtctactttgctgaatatcttggatcataaagacggcacttacatgtgagattactcttaacctcacaaatcttctcgcgatgggtgtcttcgattgcataggtcgcatgcacgtgtagaagctccctgacaatatcaaacaggtgcttgccatgggcgtcctcgacctttttgcggccagaaagcgatacccacgctccgtgcactttcaaaattgggtcaccattggccaatttgacgtcgaagctatccccagacgcggagagcaccttctctctcaggactagtgtctgcggctcctttgcgacaaattgttcgaacagggcgattggctcggcgaatggctcgagattgtggtgacccaggatgcccatgacgacaggtggattcaattgaagctttcgaaggataaagattaaataatcaaacagggcaatcgaccacaggagcgcggggtcagtctgaagccgatcatcggttggcgatatcatcacgtgatagcttgaagaaggtttactctccttggctggagcattggtggttgttttttccgatcgcctcgcacctttggtcacgatgtagccaatagttataaacgagtgatttgtgaggcgaattcgaattcctgagctttgttccttcaggagtttctattagcattatagtgtaagtactccgccactagcatacgcggtcgttttagagctcttccacccgaccagctcgttctcttcaatttatttctctccaaaatacccaaataacgaattctgcgctctgtttttgtcaagtgaactatctcttcagcgccaagattgttgatcgcgatctccaacgatcatcactggcccattcgccctaaccccacttcattggtagaattcaaccgaacccggaaaacccggcgaacctcatgctaatatcaaaatagcttcttttcctgaatttaattgatcgttggccagcaacatgctggatattgtgtggaaggatatggcgcccactgtggctgtcgtgggaatctcccttataggcttgcgccggtattccaagttcaccgaggcccaacgagtcgtctttcagattgggcttgtttgctctattctgggactttctctgtttgtcgtgactcagttgctgggtctcgtatcttacaaggatatttaagcttatgtgtgatggggcatttcgcgacatcgattatactgtaatgcgtcttcgcgtgcgcgtggataggcgtgccaattcgcgcgtttctgtttcgacgggttttaagtcttcgattttctcgtctatgctcaccaaatcctccgcaatctcatatggtgcttgatctgagctagattatgggagtacgtagtataaatgacggagccggctaaaaggtccaattgctagcaatttccgctatctacgccggtttcggtaactccaacgccgataataatgagagcgatcattacctaccccgccagacaacgagctatcaccgatcagcgctaacaacatccatccttttcaaccgcggatgttcgacagaaacacgaaacgctcactgggatgtctgcagatgccaaggcaatgtcgcgtgcaggttcgataaaagccgcttcggtagtctttccaaggcgagtgagacattcatataagccatgcaacccccacacattgttgagctttgccctacgccgaggatagtccagggcaaatccaagatcctgtttgaacagcacttctgcctcctcggcgcgattctgctccaggagcaagccgccgagggcatggcggactggctgcatccaggggggcgggtcagagtacgcaagtccatcctcgcgcacaatagcttccctgagaaaggaaaatccgttctcaatgtttcctttccggtactccaattctccagcaagcatggccgaggctacccctagaacgtcttcctccttgcatggtatgctgttgagtcgggtactagggactgccctgcgtgccgcttcaaattctacctgggcattttcggcttctgcaatccgtccaagtgcgctaaacgcaagaccacgggtgtaataaatgatagctgtggtcacgcaatatgtatcacgatccgtgggaagctcaaggctgagaacctcctcccaacggccaaaacgcactaggacatgtgccttgctccccacaaagctttcgataaagtctgccatcgggggacttttgatcgccagcacttgaggatatatgaccttttcgagcttttcggcagcagagattgcgtccgagaagcgaccggacatcatagcggaatacaatttcgcacagatataatgtacccggtaggctgtgtacataattgtgcccgtctctcgggcaaaatagatgtcgtcggcaagcatcgcttgatgattggagtcgataccacggcggtagtcgcccactgccgcatcgatgtgcgtcggcatatgcaacatgtgcgaagcatgcggaaccatcccacgcagtcgatctgcagccggtagagccaattctgggaatggagacatctccaacatgtgtatatacagatgacagagtgccggatgatcgtgaccggtagtctgcttcagccccagctcaatgacctcgcgagcctcgaccgtgtgatttcctgtaggtttgccgctatccaaatcccacagcccgcgtggggtgatacacatcagtgcatcggcgaacagagcagcgacgtccatatcgttgctgaatttctgatacacagggcgcatggcatttgcgtatgcgtggtcaaaaggacttaggtcgtcggggatgtcatggacggatggaaagcgggcaccgatggcttcgatcaatgcctgttcgactggggtagcatgacttaccagcttgcgtgctcgttctaggacattattgaccttctcgatagaagcccggcgaccttttggatcaaagaacttccaagccttgttgtaattcggcccggcagcgtaggcgactccccataacgctatcgcgcagttggggtcactgtccgctgcgcgttggaagcatcgctctgcctcatcatggttgaaagaaaatgcccatatcagtccgcgatcgaaccacagttgggtttctgccgaagaggtggtcactggtcgatgatgcgagccaagatcgtaataggtttcttggtccgaggcaggagatttggactggtccctaattgaggtattacattagaatccgaattatcagaacccgagacactcactgcatgctgggtactatggtcttgcgaggagatcacaccgtggtttcctctaccgtttaggtttccttcaatccaactttcttttcccgtgagaacagaaattgatgatgagcgaatcaagcttggtctagacaggacggaagctgatgaaagaatgaagcatcgagatgataagtggcaaaagagagagataaggaagaagatcggggtttaccccgccttttaaagccacccgtggaccttctgagtttatctacgacatgacccacattagatctatatatcaaggagcatagtacatttgcacgatgcgtctcgacagcaagtgggccgctctactcccggtcattcaagatatctgcaacatctcgggtatcccagggctgtcgctgggcatcgtggagaataacaaaaccgtataccccccttcgctgcacaactttcgtgctagggtccctcaccaaaagcctgacggctgctctagtagcctctcttcatgacgtcggtatcattccctcatgggatgctccattgaagacgttgctaccagagtttcatcgcgaagatatctacggcgaaattactctcaccgatctgcttacataccgtaccgacctagcatctcttgactctctctggctcgcctcgaacaatgttccttatctgcctcgatcggaggtcgttcgaatcctcaattacgccccgggtatccagccattttgaacacagttcatttacaacaacttcagctacgaggtactcggccaggtgattgaaaaggcgtcgggtgaaatatttgcagaggttctgcagagtcgccttctcagcccgctcggtatgcaccgaacatattacacaggggagagcagtgaaaacgaagcgaagccctatgctgcgctagaggacgggtctattgtccctattgcaccgccactgcatggtgagaatgtgttgatggggccagccggtggttttcgaagctctgtcaatgatttattgaccctctataaagccttcatgggtgctgctcttcatgagattattcatccagacacgggcttgcctgatcagtccaagtccaccattcgaggtatcaatcagctatggaaagggcatcaatccctgccctttcattccctcagggagcattcgtatggatttggctgggcccgggccgacctttggcactggaacatgaagtttttcttgaatctccaaatacaagttagcgtgtcctgttgcaaaatcccccaaatgtataatctcttacaaattgcatggttgctacttcagaggctgtggtgtagtgggctggtcccgaattggggtttggtattttgacaatcagctgcttcccatcttgcatcgtcgcgaggaatactttgttaaagttcccctctggtagccttgacaaattcagacagactgcatcttgacctgcagcttcttcggcgatgtcgatgagtgcatttacgtcggattggatgtatctgcgtcgtaattgctctgattcgttccataaccatctctgagcgaaataactgtaataaggctccaggtcggaacctatcacttggtgagtcggagataatgtaataaacaaagcaacctaccagatttggctcttcatctgctgggcgacatggtgaattttcgagtgatgtgatgcatgggtaatttcagggggttgaatctaatccgagagttcttacaagcttgaaaaatcattttgggacgacgcagtatggcgataatatgtgagtgaagttgggttggtttgccagggggattctgctcgtacatgacggagcgaaaaaggaaacaattgaggttggctgatatttgtggcagcctgcagatggcatggtctaaacacataagtcgtattaatggagtgaaattgagaataccgaggtatctctcaagaaaggccaattccgaccccattgctcgagacagccaagtacaatcgaatatagcgtggtaattccgaaatggccaaagaatacaagatcaacgacaccaagtattcaacttcattatctatatccttctcagggccacacctaacaataatcctgtacaatccaaataccagctataaactcaaccacttagacgtactcccaagcaaccggggtgctagtgttgacagagacagccagagcatcgaagccgaggcagtcaccaaccttgccagtggggacagtagcgttctgcagagcagcaaaaacctgccacttaggggcagcagcgccccggcgggaacggcgggagctggtggtactgttggtggtaccgttggcagtagggcaagccatgaagccagatgcacccaggccattgaaggtccagtggccgaaagaggcaccgggagtgtagacgaagggaccatcagaggaaccaacgggctcgtaggcagagtggggagatgtgaagcgcagagcacccttgttatcaacgtagatagcctggccaccggggacctcgacatcctggatatgaagttagcaaatggagcattggaaatatacatgtatcagtatttctaaccaagtagtgtccgttggcaatcacggtctggttggtgttgggaattccggggacgggagaataggtgtaggcgttgccaccgagccagaagtagctgccggcggcattgaggggcagcaggtggacgggagaagccgagcgggcagagatgacgctgaaggcagcatcggagctgttggcctgcttagagccggggatggcagccaccagaggggcgagggcgagaatagcagagaacttcatcttgagggataggggaagtgattgatactgaggatgagagaattatcaatgaagagagatattcaggggatctgtcagggtcatatataaggtacgctcggaaaggaacgtgcttaggcaactccataagcggacccagctgagaaatcttgtgatcgacattgaatccggtggagccgagttgaagagaaagagggaaatgtcttacctagacgatacaacataatcctgttcgatatatatagagatgggagtatgtatagggagcctggaaggcccaagatgggaggaaaccctaattaggtaggagtgacaacaaacaggtcacatacatcagcagtatatctctacccaccgtctacttggactattgagaggggcttcaacacggtggagatcgactaactggaccacaaatgtaggtattccccttcacggtgtcaattgacgcaaaagtagacaccccaattgatccaaaacacatgctgttggaccctgaagatcccaatagaagagccggaaaaagctgtttcagagaactcatgaaagttcgacagtgattaaagatcgaccggaggtccgacagactttgcccctaagaaaaaagaagagaacggcaacctcttagctgcgccatatggggatccacgatatccacattgtctcagggcacatcgtctttgccatcatcattggctgtgtcgtcaactggcgtgatatcggttatctatcgtgagtggctgtattgctattttaatttagaagttctcgaatgtctcgaatgtgtcgactgaataactatatcatacctcggttgatagcattgccaccgtccgatgtatatattgtctcacataaatggattgatgatgtggaataatcaggatataacagccctaccagcgtagccaaccccccaaagtacatactccgtagtagattgtttattgtaggaaaaggcttacaataagtgggataattccacaaacttcctcgtacaccccacgatgtttttgataaaaggggcatttaatatgatgtcagtgatatgatgtcaggtgacccacccttttctccgtgacgcgatggaaatagaacaacaatcaaccaaacttgtgcttaatcattttcagaaggtctacaagatcatgggcatcgaagagtgaatggcttccccacgtgccaaggccggagcttcgcgctcggtcaaattctccccttccacgcgtcgcggctatacgtcactcccgaattcaacagtcgaacactcaatctcacagagcaatttgggacaaaatgacgacctggacactccttcaagtggggatgagtccatcgagcaggccaatataaaactcctacctttgaaacaaggtagagctcgagattcacggctctcgagccccaaaacaaatgaaccgaaccccactatcaatgtccccgacgacgagcgtgatgcatcagagcgaataaaagagattctcgaggcgaatggcaccattccattgaactcattctcgacagatttggaggaaggacattcggacagagactctctggttctcagtgatcgatatagtgacgactatggtatcccgtctgacaagggcctgcttttgaacgatataaagcgtgaagatgtgggaaagggctctgactggaggtcattgttccgtctgacttcctggtggaacgttctcggcttgttgataatcgccctactggtagtatggttttcgctcaggggactgggctggtcttctgtcggagctgccattggtgaatttgtaggtctttcttccttttcgtctggtcatttgaagacaagaaatcagcctctaacaatcacagcaagcggtcccctggtaccctactcccctcggcggaacgagcgaacaatggaaggagagctatgccaaagctcagaaaatggtcagagaaatgagcctcgccgaaaaagtgaacgttacaactggaacaggctggcaaatgggactctgtgttggcaatacgggtaggcccttgatatccgttcgctaccatggctatgcaaactctaacgcgaactgggttgtctagcacctgccgaactcgtcaaatttccctccctttgcctacaagacggtcctctcggactcagatttgcgcacaacattacagctttccccgcagggatcaccacgggtgcgacatggaaccgcgagctcatgcaaatgcgtggctttgctctgggaaaggaggcgcggctgaaaggcgtgaatataattctcggtccatctatgggaccgattggtatgatgcctgccggtggtcgtaactgggaggcattcggttcagatccagttttgcaaggcgtggctgcggcggagaccatccgcggtatccagcggaacggggtcatggccacggcgaaacacttcattggaaatgaacaagaacacttccgtcagtcatttgagtggggtactccaactgcgctctcatcgaatatcgatgatcgcgcattacacgaagtctttgcctggcccttcgctgagagtgtgcgtgcggatgtggcgagcgtcatgtgctcctaccaaatggtcaacaacagctatgcttgcgaaaatagtaaactcatcaacggtcttctgaaagatgagctcggattccagggattcgtgcagtcggactggctggctcagcgttcaggcgtgcacagcgctattggaggcctggatatgagcatgcccggtgatggccttcattgggccgacggtgtcgcgctctggggaagtgaactgactcgcgcagcgttgaacacgtctgttcccattgagcgcctgaatgatatggtcactcgcatcgtggccgcctggtaccatctcagacaggactcatgggaaccccctgcacctgagggcgacggcgggccgaacttctcgtcctggactcaggagcgaatcgggcacttgcatgaaggctcaccggataatgatgcgacgggtgtggtcaacaaatttgtcgacgcacagggaacaggcgaggacgctcattctgttgttgctcgtcatgtcgctgccgaaggcaccgtgcttctgaaaaatattaataatacccttccactcttgcgggcacagtccgcaaccaatggcaaataccgggtcggtgtatacggcgaagacgctggtcctggccaaggaccgaatgcttgtgctgacagaggatgtaaccaagggaccttgggctctggttggggtagtggggctgtggaattcccatacttgatcagtccatgggaagcactgcaacatgcgtggtcgaatgactctgtcgatgtcaaagcttatttgacgaataatgttgcacctcaggacctcgcaaagcaggacctctgtttggtctttgccaacgcagacggaggagaagggttcatccgcagtgacggcattgatgctgatcgaaaggatctctttctacaaaagaacggcactcagttggtagagggggtggccaagcactgcggcggtggccaaggtaaaaccgtcgttatagtacactccattggccccgttgtgatggagtcttggattgaccttcccggtgtccacgctgtactgtatgccaacctacctgggcaagaaagcgggaatgcgttgatggacgttctatttggagacgtcgacgccagtgggcgtctgccatacaccatcggacgaagcctagaggactacggtccaggcgcacaagttctgtatgagcatgcagacccatccgttccacaggtcgacctcagccagggcctgtatatcgattaccggtatttcgacaagttcaacatcactccccggttcgaattcggcttcggtctgtcatacacaaccttcgactactctgcactgagcatcgagaagctgcagaagaagtcccaatggccttccaaacggcccacaaacgaagtcgaacctcccacatacgacaaaaaacaggaggacgccagcagcattttattcccgccaggtttccgtgtactccggaaatacatctacccctacctcaccagcctagaaggaaccgaacccggtccatacccataccccgaaggatacaacaaacaccaaaatccatccgccgcaggcggcggaccgggcgggaatccatctctctacgagcccatcctcgagctcaccgtcgaggtgacaaacaccggcacgcgcccgggacaggatgtggtccaggtgtatgtttctttccccgaagatgtcgccgagcaccgtggactaggatggtcccgtgagtcaattgagttccctgaacgtgtcctgcggaatttttcgaaaatcctcctgcaaccgggtgagactagaaatgtcaagatgacgttgactcggaaggatctcagctattggagtgttcgtgcacagaactgggtgttgcctactgaagggaaattccgcatctgggctgggcgtagttctagagatttaccgctcgtggttgagttttgatccaggacttggaatactgttataattataaaattgactcgatctaatttcccaaatgtgtctacgtggctacaagaagccgaacttgaaataaacggaccatagtatatgtctatcgtactgaacagggccatgaaaagccagagcgaaacaaaatcaaataacgtataaacttttgctttgacatggtagatgcactgagttaggtatctatccgaaacatgtacatactggcggaaatggcaataacaaaatctatgccggtaaaaaaagaaaagagaacagaacgcagaacgccgaaacaccgtctatgagatccaatgcagaccaaaacattatcatggtgctcatgatgcgaggacatctcagcgattacgaatcataatgttaaagcacgtagaagcacgtctattcgtcgtcggagtcctcgggcttgggagtacccttgggggagttcaactagaaaatgggttagcatactgtggaagaaaagaaatcaacatgaataaggaaactcacccattcgatgtagcgcagacgacgacggatctcacgctccttctgctgagcacgggtcatcttcttcttcttcttagcgcggaacttgaggtcgccttcatcgccagagttgacggcagatggggcggcggatggggcggcactggtaacggcggagccagtggcgggggttccagggccggaaggcgagttggcggcactgtcctcgaagcggtcgaggctgacggcgttgttggtgcggctgacaacgcgaccgtcggcgatgtgcagttgctcggggcagagagcgcccacaaactcttcgttgtgagaaatcataacgacaccacccttgaagtcacggatggcaacggctagaccaccgagcgagtcacgatccaagaagttagtcggctcgtccaggaccagcaaatgggggttgttccacatggcaccggcaagcacgaccttgaccttctgaccaccggaaagaccggagatctcgttgtggttggcgatctcggggtccataccaatgtcctcgaagtgcttggtgatggtcttggggtccagaacacggaagcccagaccttcacgggaagcctcgtgatcgtcgaactcctgaatcaacttgaagaaaccaagctcgagcagggtctcacgcgagatcatggtgttgtacttggggagaaggccaacccacttgacctcatattggaaggacttcttccacttctgacgaccaatcaaggtttcgatgcgacgggcaccgcggccgtcacccaggtcaactggcttctccagctggatcttgtcctcttcggtaagaatacgggtctgcttcatgaacacttcacgatcgtcaccgttggcgtaacgccactggaggtactggctgggagtcttctccaaatgcatctcaacgtgctccagagcgtgctgcttgatgtaaccgatacgcaagttggggtgcttctccacctttccgccttgaggaatggtctcaccagtcagaatcttgatgaaagtagacttgccggcaccgtttccaccaatgatagcgacacgggaggagagggtaagggacagcgaggcatcgtggagcgaggggcgggcagcgccagggtaggtgtatgagacgttgctcatgcgcataatggcacgagttgcggacttgataccagacaagatgcctgggggagggaacttgaactgcacattggatgcggacagagtgtagtaactcttgccctcgggcttctgcttgacgaattcggcaaggttacccttgtagcagacgagcttcttgccctcgtagtggtagatatccgtgcagacagcatcgaggaagccggagtcgtgactgacgatcaaactggtgatctcggtgtgcgatttgaggtactcctggagccacttgacgtttgccacatccaagtgattagtaggttcgtcgagcaagagcacatcagccttctggagcatagcacgggccaaagccaacttcatcttccaaccaccggacagagagcccacgggctgggactggcggccctcggggccatcggtgaatccgaactcgaggagaacctcgcgaatgtggtccataccctgggaaacaatcttggggtccttggcaacatactcaaggatggtcaggttggcatcttcaccctggttgtgctccacgaagcaagtgcgaacctcatcctggggcgggaagccttccaacttctcgttggcgatactgcgcatcagagtagactttccggcaccgttgcgaccgcaaagaccgtatcggtggcccttgaggagacgcaggttggtgtgggacagcaggagcatacctccgtaagcaagagagaagttggcgttgacaatctcaacatcgttggggtcatctgggatgggcttgccgaacttgatctcatcctctgcgatgtagtgggcttgaacagcagcggcgacagcctccgcgttaccatccgcaagcagaccgcgcaggtatgggctaatgcggtcggagatacggtcgtgcatgcggcagttgacatcttcgcggaccatgccggcaatgaagttcttggccagatcctgcagcttggagtctaaaccaaccagaccaccatgctcctgaatcttggcattcagcacgaccaggacctcctcgggggtgatcttggagatggaaccagaggcaagatggttgtctcccatggcagtctcgataacgtcgagagcacgggtggcgagctcgcgaacctcgggcagggaggcagtctccttgaccgacttcacaccaggctggagcttggggaggaaagtacgggcctcagcgggatcgtggaccagcttggtcagattctccacaacgaccacggtctggcgaagggtttcttggggagtagcaggggtattgagggatcgagcgagcagaggagtcaacatggccaacacgggagatgtgacgatggcgacgaaggtggtctgagacaaagcgtggatggccttttgaagagtctgggcggaggggttctccatggtcttgatcagaaggggaatacggggggcgacatcgtcgttcgacaggagggtggtgagagcagtcatggtcttgcaagactgcttggtcacttcactcttcaggtcgtgcatgccggactcgacaatggggatgagctccttcagggtcttgcccatagcctcacgcagcaagtccttctggcgctcctcgtccttggtacccttgcccaactgcgccttgacggccatcttttcgatcagcgagtaggcacccacaaagccttgccacttgccagatcccttggccaggtagcgctcgagagcggggatcagaccgttgaccatggcctcggggctgagacagccgaagagggcatcaatggcgtactgggcagcatcacggacgacggcacccttgtcagaaagggcatccagagcaaggtcgaagacgcctccgtcgtgcaagaggaaaacggcttcactgagaggaaattctcgggggaagcgctcgaacaaagcaccgatgatgagcatggcacattcgcgcttggtaggattcttcttatcggaagcagccttgcgaacatcggcgagaacattgtagttcagcaggccggctgtgccggcgccctgaataagcaggttggtcaaggcatatgcgccatccaaagacttctgggaggtgtcggaagtgaagatggtgttgaggactgaggaaatctcctcggaggtggggggcacgccggaggggccctttgcaacgacagtcggcatggcgggagtctcagatggtgagacagtatgcggcattttccagagaaacagaaagtcgaagatcgagtgtcggtatcaaagaaagataccgaaaaaaaaaaaaaaaattgaagcccttgggtagagaggggcaattcgaccttacggaagataagactgttcacagcgcaactcacgcacacaaacagaggagtaggatcgggttgaatcgtagagtatgtacacacgattctgaagaaaccctgaagacccgaaacacaacgaaaaaagaaacacaaagaggggagagtggtctaaagaagtaaaaacaatcttcgccatcgccgattgctgacccacgggcgaccgaaatttttttttgcttactcatccaatcagcgggtccggcggtgccatgggacaaaaggcgcctaaccggatttgtctgattgggtcagtgacatgtctgccttggtgcctggaactcctgatgccttactgcctgaatatcgttctgccttgttgccttattcctgaaattgagctatgcctgaggcgttacgtcacagcaatcagaagtaccaacgtgaaccgacgcttctgacggataaatggatgttctttttcactctggcgagccccgaggctcatctcgtaaggatattggcggcattgggttcgactcggtccgaggccagccttctccaagtatgtcagtagctatcgtatacaatgcatgtcaatgaaagatatcacgatttataccactactctgtagactatccaggtagactgaattacgaaatagccctgtgttcactgagatgcgtcatatccgtccatttcatcatccccaacgttagcacagccgatatggccgcatgaccccgggcctcggtagacacaaccccttgttccccgcgtccaaccggtctgcattcggtcaaggcgatctctgagttcggctgtttatttctcctctttttgtacatttatcctcgtcaatcccccgagtttgacttcaattgctgtttctccctattcccgcaattcatctccgcccccgcaaatccacccccggaccccatcaccacaccacacaaaatggctctcagctggagatcaacccggcatgtttcaaggcttgcacaggtgagtttggatgataatgattacttgtaattagacatttcgggctcgctaacttttcttttaagtcagcacgacctgtcctctcggcacgtcactatgcgaccgccgagcccgacctgaagactaccttgaaggaggtcatcccggctaagcgggagcttctcaagcaggtcaaggcacagagtgaggaagtcatcggcgaggtaaagttcgcaaatgtcattggtggtatgcgtggtcttaaagccatcctctgggagggctccgtccttgacgctgatgagggaatccgcttccacggcaagacaatcaaagactgccagaaggaacttcccaagggtacaactggcacagaaatgctacccgaggctatgttctggctgttgctcacgggccaggtgccctccaccggacaggttcgtgccttctcgcgcgagctcgccgagaagtccgaactcccctcatatatcctagacctgatcaagactttcccctcctcaatgcaccctatgacccagctgtcaattgctgtggcagccctcaataacgaatccaagttcgccaaggcctacgcggatggcatcaataaggccgactactgggagcctacctttgacgacagcatctcccttcttgctaagattcctcgcgtggccgccattatcttccgtcccaatgacatcgatgccgttggtacccagaagcttgacgttactcaggattgggcacacaatttcgcagagctgctgggcaagggtggctcagaccatgctgacttccacgacctactccgtctttatcttgctctgcacggtgaccacgaaggtggtaacgtgtcagcccacgcgactcacctcgttggaagcgccctgagcgatcctttcctgagctacagtgctggtctcttgggcctggctggcccactccacggcctggcagcccaagaagttctccgctgggtaactgccatgcaggataagatcggaaccaagttcacagatgaggatgtccgcaactatctctgggatactctcaagtcgggacgtgtggtccctggatatggtcacggagttctgcgcaagcccgaccctcgtttccaggctctgatggacttcgccgccacccgccctgatgttctcgccaacccggtattccagttggttaagaagaactcggagatcgctccgggtgtgctcactgagcacggaaaggtatgtccaacagcagacatcatcaaaatatctttctcagctaatgatttttacttttctacagaccaagaacccataccccaacgtcgatgccgccagcggtgtccttttccaccactttggtttccaacagcccctatactacaccgtcgctttcggtgtcagccgtgccctcggccctctatcccagctgatctgggatcgcgttcttggcatgcccattgagcgccctaagagcatcaacctctcgggcctgctcagcaagaaataaataccaatatgttgcctggtgcgacctaaaactccttggcctcgacggttcaaatgatgaatgtgaagcgagctttcctgatttttcattttcgttcggtcgctttcgttttctcttatgtatttcatccgactagacagaattacctctatagaatgcttgtttttctgatcaattggatctcaattttgagcaaaagaagtacttgagattatggagagtaatgtaaaccggatgggaagatcgtcatgaagataatgtaagacatgcaaggcagccgtttgtgattgactttcgagagatggccatattccctgtagccttggaccagtctccacagactgtgtgttggcggtcgtaaggagctcggcctgcatatggatcggaagaagaccgagagccgaggagtatcaagttgcaatttaggaaactcgcttgattgaataaacaatgtcaatataacgaacagaatgctgatatatgcattatctccatgtctagctaagataaaatagaactggtcgtcttaaaaacgcaaagcaaatatgtaatcctatccagaatctgcatctgcctcggctcacaaacgaatactcccagtcgacaattgctcccactctctctgtccatacggcgaatagctcttatcaccaggtgcaatccacaagaagtggtcatccttaccctcgggggctttagttccaagcaaagcaataccaacactctcatcccgaagcggtaccttgttctgcttatgattgtggatgtgcgtgggattctcgacgatgcgaaggaacaacggaatagcatatttaggcagcttggagcgtacgaatctcggaagcgctgtgttgtcaaatgtctgtcgggcgtccgggctaatctgaatagctgcacacccagcccgtccttcgtaattgggaagacggacgccgtagacgttcgcctcggtaataccagggaagtggcctaggacctctgaaacttccgcggttgctctagtccatgaatgctttgattagctttgcttgtattccctcaggtgatttcaactcacacgttctcgctcttccagcggaaggtatccccaagtcggtcgaggaagtaccaacggccatcactctgccgacgcagagcatctccagatcgataatagagatccccttcttgaaggcgtcgcgcaggaatttcttattggtcgcctcgtcattgcgccagtacccctggaaagccttttcaccaggaacattgacgataatctcaccccctgctcataaggcgcgcgaagcgcaaagccagtattagaatcgcgcagaatatccccagtctctgggtcaatagcaacaggaacgaagacattatacagtataccccgcatgatcaaaccgtggtgaccaaaaattccagacgtgaaaggaccgcttaaagaactccccgacttcagcgactctaaaccgctcccggatatccggccgcagaccgttgccgtacatacagcggaccttgtggtttcggtcctggggtgatgggggcggcacgagcaggtaatgcgctgtctctctgacatagatgaaaatagtcgactccaagtcgcgggcatcggtccagaatctactcacgctgaacttgggtgcgatggcgacgctcacgcccattactagacatgcgattacggcgacggctgctgtgctgtggtacaaaggcatgcagctgtatcagcgatcgccgtctgggccgggcgtgtctcccatcagggcacgtcggatgaagagagtggtatatagtctggacattgtgaacgcacagcccttgggcatacccgtggtgccggaggtgtgtaggaggatcgctgggaagtcgctggtcacatgtttgctcagttccttgggtgggagggttattgggaaagtgttgatatgcgcctttagcgagctgtccagggtcatcgacttcattcccagattgtgtgtaatagcgtcgttgctttcatcgacgcgggcacgacagtcggcatcttcgtcgacgagcagaatattcgcgccactgatcttcagacagtgcagcaatgcgtcgccagtgagattgtaattgatcgcggccggggcacagccaatgctccagaggccgatccatgcgaaaatgtactcgttgctgttctggaggtaaagggcaacgaggtcacctttcttcacgccctgtgataagaagaaatgggcgtattggcaggcttggtcttggatttctcggtaggtgtatggtctctcgcgagtccagacacagtccatgccggggtattacttcacagtctgcagtaggacgaaccatggatttccttggttttgacgaactaaagctgatcagtatggtttacaattgtcggatagtatgtgaacataccggcattggcatattgtcgttcagcgtgcttcatcgtgaccaaatttgatacatccttctgaatatgaaatttggcattcagatatcctgcgactgtggctcctcccacgagagcagcggtggtacaacatgagcatagcattatgatagaccatctcgtaccactcgatggtcaaaattcttgctcttcccagacctcctcagcaattcttcaaaatagcgccgtcaaggctgatcttcgtttctttcgggatactcggcgtgcgaagaaagagcttatcgaagctgataataagcggctggcccctgaggcagacacgattgttctcgcctttgctgatcgtaacgatttgctgacgtttgaccctatcgttcacaagttcctataactctagcacgatttcaggcgagctccggccgatcttgattgtgatgaccatttgaacatcgccgttggattgggaaaaccagaaccgagcatctgacatcaatttgctgggcgactctgaaaagcccgtttctatgacaagcgagggccatttcttcgtccgagctcgaggaagtctttttggtaaaaattgacagtctggctgtttagcagagccattctctgctttgcaagtagcggctccaaagcttcgaagactataatcgagttccattggcttgaggcaatcaaagaagagcctttcaaataagtgtgccgtaacttcatgagcgcgtgagactgccattttgacaaggagaaggtgttgggaagagtcgtaagaattccagcaacgctgaaggatactatcgtccgagtttaggaagtcgcgactgaaggcctgcttattaaccttggtgaagagcacccattcactggcctcaaattcctcttgttggcgatttagttccatctttacagtttctagaaattgtttagttcccttgtacggataccttctgatcgggggtcctagatcaccgagaaagctgctgctagagctctcggtgtctagctcaaactttgtgttcgaggacatgatagccgcaataataccgtcccgtgttagtgtgaaagaagaaacattcccatattgactgtaggcattaagaatcgtccccgaggaccacctgacgctaatgtgacgtagccttattacgaccttcagcgcaatagacatatacgtgcagggccaatagaactattcttccccaaagttagcggttagtcttagtcttggagaatgaagtttaaagaggctgaatatagacatgatatggaaaagatcttgagaaaaaaaagtcccaggatggcattccgattgccgataattgtccgaattggtgacttgctcacgatttactgatcacagggatatcatgctactgaaaatatcgagattatgccggaatatattcaaacagattataatatctcagtagacatatctgatctggccttgggccaaccgccggttcatccacccgtaatacagtctcaaagaaacacatacggaacaagcaagcagcaggagcgctgcgttggtccagtggccagtagggaagcctttcttggcttgattggacttgtagatccagacacctacgatttgaccaggcgctccgaaggaaatattcatcgcaatggccaaaccaattccagccgttgagcggagattggaagacagccagcccagaagaggaggaatgcatgagaatgcacccgaggtagcgacaatcaagcatccatagcggtgctggtgagctgatgttaacatatattcgtttacagtgttgtgcgtagatcagaaattgctcaccagataagcgtctgcaggaaggacagcggaagctaagaaacccatagcaccaataaatgagaagatagcagaatgcataccgcgactgtatcttgattagcgatgccaattgattgggggcctgaagagggggaacgaacgcattgaagtagtctgcagaccaggagaccgcaagagttactacatatgcaacggcttatggaggaaccgtcatcaactgagcctgtagattttcataacccaaaccggcggtgatggttggtgtgaaaagtgacagactagaaaatggcacggaaatggaaaagtatacctaaaaatatcagtcaacgaatgaatccaacggtttcccccgaagacaccttatacataccagataatgggcataaagtcgccattctgtcaacactgccttggcttcactccaggtcattgctttggccgcaccctggcctccttccacggcgagtcgctgtttagccagtgccttgtcctccgcagttaagaaaccacaagtctctgggtaatctggaagaaagaaccaaacaaggattgcagatgcgcacgaaggcgcgccttcaatgataaagagccatctccaggcggaaagaccccttacaccattcatatgcccgactccgtatgcaatggctcctccaaacgcgcctgccaaggtggcagaagccaagataaacgcgactctcaatgatcgttccgacactttataccaaaatgtgaggtaaaatactagtccagggaataggccagcttcaagcaccccgaggagaaaacgaactcctgcgacttgtgcgaaattctgggcacctccaaggcccatggtgactgcgccccaggagaacatgaggaacgcaatccagcgctataatttgcaattagcttaagttggtaaaccacatgggacggttactaacacttggtttcaatttcttgaggaaatagttggaagggacttcaaagagaccgtaggcgatcaagaacaccattagagcgatgctagtttaagtcagaagtgccgcgaagtatgggaagtcgcattgcctcacatgtattggtggtctgtcatattcgtttcgtcgagcaaatcattgcctgtgcctgagttgagagtcttcgcattgcctgttttgatcgacttgtcagtactggcgctggctaattggcatactgaatccaaacataccaacattggaacggtcaaggtaacaaagtagataaattccagcgcataggggtagaattcgaagatcttgcttgcgaatgagggacttttcttgctcgaagtcgacctcgatcgccggggaaggacttccattctacagttatgattagttaagatacagatatcaggggtaaggatgtagtgtataccttcatccctatctccacatcttccaccatatctgctggactcttgtggttctgcattaggggtatcgaggttagggacggagaagtgcagcaatctggggtagctaaaatccggggaaagcagtttcaagatatacacaattccccaaccgtgccccatagtttaatttttcggggtaggaggccgtctccgatggctaaacggctaattgtggccaactacggtagcctaaacgggccacatttgaaaccctcggtgatacttactgtcttcaccgctggagtttccgcctttgtaatataccgcttaatacagtccgcgtattttgaaacttagacactgaacacccacgttaagcgtcacatccagtgcagcgtcacatccagtgcagcgtcacatccagtgcagcgtcacatccagtgcggcgtgccaacagttttcccttcctgcctccgcagtagttggtggaagctcgatcaacaacgtcgatgactccaaggctccatccgcatctacgtcttacattctgagggctgtgctgccggtgtagcgaactaagcctagtaggccaacatggttctggctgggggtttcgaactcctactcactactactaattctcccccaaaatctgttcacttcaactaatgcagacttacaaggcttcattatgacttatgttatgtaaaggcacagtctggaagcaattgaatatgaccagtggattccaacatatgattacctacggagtagtaaaagtacttctatccatggatccatggatgcttaagggtacgttagtcagcccacgaatttcagaagattaatccgcgagacatgtgggattatcctcctattggttgatgcttatctggtttgattacattgctggtttactacaactgcccggaatggacatgaaccagttcccagatgtcgcaccagatcagcgggatctcatccaatatttcacctgccaagcatcggttatgatttcgtgtcacccacagatgcagcatgaagcctgcaatgtgttaatgcctttgtcatccgcaagtaacgctctgctttattctctgttggccttcgctgctggtcaccaagcctctcgtaccacagacgaagtcgaaaaacgacatttccgacgccagatgattcaactcgaaaccaaaagtgtacgtgatcttcaaggggagatttctcttcagcttcggtcaggtcttccccttatggcatctagtttgatactatgtctgtgctctctttgccatgagggtgacgactatatatcttggagagcccacctccgaggcgtaaaggcggccttttctattataagcgctacagaatttgcaggaaaagaatctcaaatcgaatacctgacaaagcgctatcagttgctagaagctattgcaatgcttacagctaaaggatttgaggcgctagagccgaaggacgaccagtaactatcctctcaagcctttttggacgatcatgtggcttgttacaatgaagtcctggatatgtttcgccatattggagctgtagctttcgaccgacgcaagcttgatgttacaccgcaaaactcgattttgtccccaagtgattttgaattggaaggccaaagtatggagtctgctttgcttcgaatgatacacagagacaataatttaccgcccagatttcttccaagggtacaagagatgcttaacgccggccaagtcggggaattcaccatctgcaaccaaatttacgaatacacggctcttcttcatgtgttgacgcagacacggggatgttttcgtttggtcttgggagttccgagactgtgacaaatcttatcagattatcttatagggcgtggaaatggaggacatagcccggggcactcgacttgcagtatttgtttgttgactcgcaagagttaattttcccgagatactcatccggatttttcttggtgaagtttttgacagcaaatcggctgaccatcatgatctcgtctcccaatccattgcgggtactatgatgtattagccacaggaatgtggaatagaaaatagaaaaaattgggcgaccataccatctttgattcttcgtagctttggatttccaagttattatagaactcttcagttccaaattccttgcgccatttcacaaaggctgcgtgtcacctaaaaatcattgagctgtaaggaaaaaccccttataactcaccgttgttgagatataagattgtaaaataaggcatttgctatggtgttatgggtggcccactcgcttgtgaaatatgtcggaggaaaaaacaccgcatgttaccactagaccaaaaaggtgcacaccttacttaggaaggataactggtgtaactagttatttctcgttctgacaaaatacgttaataggtcaggtgatcttctagttagatctaggtattctgccacctagtaccatatagatcccacggtactaacattaagattccagaactcaagccggctaggtctagatcaggattgagatgatcgtggctgtggggcttggcatggagttaagtaccgtttgccgaagatgctgacagcggagatgcttggcaaagtgtctcaatgattcgaaatgggatccctaggtaaccctggactgttctcacataacattgtgcaatattacaatttgaatgccaaataatcaagcatttcctaatccataggctttcatttatttgcctggcctcagatcactgcttctgttttcattccaagacaattcattagcgtccggacaagcccagctactttggtctgtcaaattgaacgagattctcgactaatcgacactttgcgacagacccacagatcgtcatcatccgaagggttcagcttatcttgacgttttctagaacccaaagaaagatctccattgtgactgaggaaggcagcaacaatccacgatgacctagtattgatgcaggtggctgacaggccaagatctccacagcggattgtgttcatcataccacagagtcgaactcacgataaatcctacactaggcttacaaatgcacactttgaaaggtcagcgtgcaaatttcgttctcgtttagatcagatcccaggcagccaaatatcggtcatccatgggtcttatgtgggtcttattctagccacgcgtccatgtattcgctttcttcatacttggcaaaggtcttttgcttagttctggggtgctgacacaggctcggttgaaatgctttggtcaattgatactcgttaggtatgggtctttgcttattatatcttggccacagcagagacaccacaggtgatgagatacctggcggtggggctggagattcgtacatgtcgacgttaattctatataatcctacatattactgcttacagggagattgattatactttggacaataagacgaagtataatatctaggatgaagaagccgaccttgtccttcacttttctggccttgcatgcatggtttgtgtcgatattggctgttggatgtaagtatacgatgtttctcaagtgtaagctgaacatatgtctgactgtttcttacaggtgatccagtgtcagttcattttatcgaccccgtcctctctcccttgaatgccacgaagaagttcagtatcacagctgggattgagacatgcaaccaaaccatcaacttcattctagaaaacaacgatgatctcttatcacaagacgtgcagattcggtatcctgggctccatggccaagctaacgagacaggtgcgctttcgggggctcacgttcggtttacaaaaggaacagtgtggatgcaggacccctatagtcgaagtcaggataacgtcggatgggcacggcttaccgtgatccaggaaggagatagcctgctcttcgatggagcattcacaatgatgggctcgcaatacgccatagagtttgagatgctcgatgatggatctactgcgatcgtagcccacgaacaggaatcgacactctctccgatctgctcaacttcacccgagacacacttgtgtaaacgacagagctgggatccttggagcaacgaggatctcacatcaacgatcggcagtacttacggttgtccaaatacgcgaaagattgccaacgttggcattatgacggattgcacttacactgcaggcttcaactcctccgattctgcctatcgctatatcttgaatatggtcaacactgcctctgtggtgtttgagaacagtttcaatatctctcttgctatacaaaatttgacaattagtgactctgaatgcccggacaatacctctggtacgactgcatggaatgtaccatgctctcggggagatctcaacacgcgccttcaagacttttcaacatggagaagctccgtggatgatgaaaatgcatactggaccttgttgactgggtgttcgggttctgctggagaggttggcgtgtcatgggttgcagcactgtgcaacacgggatctgggtctggtgatagtggagctaccaatgtcgttgcccgaacgcagaacgagtggcaggtctttgcgtaagccacaataccagttagccataaggtggtgaaattttagctgacaggatcagtcacgagtcggcgcatacattcggagcagtccacgactgcgattcgagcacctgtggaagtgactcgacacagtgctgccccctctcgtcgaatacctgtgatgctgatggacagtacctcatgagccccgtatctgaatctggcattacgcgcttttcgccctgcacaatcggaaacgtctgttcaaggcttggctctgggcaagttgatggacgctgcttggtggactcttataccggcaatacaactggtactaacgagcaatgcggcaacggtatcgtcgaaaccggcgagacatgcgactgtggaaatggtgcctgtagcgaacaagagtctcgctgctgcgactctgtgacatgccagttgcgatcaggagatggatgtgatcagacaaataatggcggttctggtaatactgccaacactgataacaatggcaacactgggggcaggatctcgggaaatggccaaccaagtaacgatgtatcatcctgggttcaaaatcatcttccgttggttattgggctttctgctggtattggtggggctttattgctgcttatacttggatgcttgattttttcctgtaggcgcagccgcaggcgaccagtggtgaataacaagcctgttgcaatgcctccacctcaatattcttagaaatgaattgttgtcaataacagaggtcatagccgtgatataatctttcggagcaagcttagcaagagatgaaattctgatcatatatatttccagcttttaggaacttaatttttggtaatttttgaaatgatatgaacaactctataacgagagatcagcgatggctacctttagctgtctgtttcacccacaataacgggccgcctggaaaccaatatgtaccggacgacatcataattagatacaaaattggtagatcgtaactatgatttatatggcccacgttattgctgatgggttctttcctccgcgttttgatccatcattagggcaacggaaacgcacgactagtcggtaagcgagtcgccatcctccccgaaacgcgtccatgaattagcacttggtcaattcaaccacccatcatgccaccaattcactcccaaaccccaagaaattcagctgagcaggagggtaggatcttactggctgtctgggctatttaaaaacacgaaatagctacgatcacccttggtgctcgcatatttgatgtgcctcgatccactttactacgatggctctcgtgataaatagggatccgcaagataggccatctaaacctgaccataaaagcctagcagagctcttaattggcatgaatttgatgctgaccatgagggcaggacttgatggctttcagcatagaaggtcagcatgccgcagcgagaagtaaggactaaacttaccgcaatactattgaacatcggcacgacatacatgaggcatttaccatcgggaagccttattcggttgatatacttgcctatgggaacgattttctctatcaccaaggatacatctgcgccctcttcgatcataggtgtgacagctcaactcgccggttgtgtgggatattcgtcaggatatcaaacaacttcttcttcttcattatcaatcaacacggaatcaaagcatgatggtagcacctcagaacatggaaagacactggctaagaatatcatcgggtaagtgcaaatcagtatcttctatacctacagtttccttctatccatactgaccacatcagcagactccataaaccaagacttccttgcatattgagatggaaatgactttacactggtaaatttataacttcgtcttcagaaaaaaccatttccttcgccaaagttgaaccgtacctctgtagccccatataaatcggaccaaggagtagtacaattaatccctgcgtgacaaaacaccaagtatagcctggaatatttgtgagccaacgaatgcatgcaatgtgatagtgggatatatttaccgacggcttcaacccaataattaatgaaccatggctcgacaaaggcagaaaactgtcgctgttagtactggagtgctccttgtcacagattgcaaattaacatacgttcaatacgacggcgtagaatgtcataatctcggtaatatgttccgggtagcaatcgaaaatgtaggtcgagacggcgcaatttccaatttgcattccagcagagactaagtaaagtaaatatcagtcatcgtttcaatacacattgtccgctatattctcacatagaaagaaagcgacttggcctgtgatccagtgccattggcgatcgattgaaaggccccaaataattgttcctaccgatgcaaggaccacacccggatacatcaggtagagtcgcatttcgggagttcggatgttgttatttgctgtcgccaagcgggagcaaatcatgtcgctaagcctaccggaagtcaagagctcggctgcaattgttccaactataagaccagagaaaagaagtccctggatttcaggctgataactggagtatgcggcaggcaccatggtcatgaaggacaagaccctattcaggcgtaagtatggactcaaggtgtctaaatgccatctatcttaccaccagtacaggcagaaaacataaggcaaaacgccgaggaccagcctgggatgcgaccacatcttgcaaaatcttatgattccttgttctgggcggggatgagctacaccgggaatttcgatcgcattctggtttgggttagattatgatgcatgagggaatttgggccctacttacccaaggtttgatcatcttcgttcggttgatatcggcaaatgattgctcatttctgattcggtccaaaatcagatcgcgaggaaacagcgtttctggcaggaaaaagacttccagaattagcaagacgccataggcaattataacatggtaaccagcccagtattggttggctaaagctgtaaagcctccaactagaccgaattgttagcagtatttcacaaagctacgttgtcaagcgccataatcgcgggacatacctaggcagcccatagtacctccgatatcaagtcccataacccagaggccaatcataaacccacgctcgtgctcaaacgaaatgtcgcggatgatacttagcccaccgacaatggacggaccagcaccgatgccctgtataaggcgagtgaccatgtatcctccaagtcctatagatctgattgttgtacaacctgtcgcaagaattgtgagggcgcatgtaccgatgaggatgggccggcgaccccagcgatcacccagggcggagaacaagagcggaccgatcatcaagcctaaggagggaatggcgattgtccaattgaccatagagtaggaagcattgaattgctcttcaagtaaagagaacgatgcgataggtgttccggtcatatacacggatagaaatcccgaataacatgctataaacaaaataaggctcttctgtgatttagaccagttcagtgggtctagggggtctgtcgtcggcgaaggtgataatggaataccgtaagggtcgagctgtagtatatcggtatccagctcatcggtgtgagctggggaagtggaaagacgaggagactttttctgctcatccaagggaggcgcgtccgtcatgtgttgactcattatgagaatgttagagatttatgaacaggcaaagagcagaaaattagagcgatgaacaatcattcatgctgcctcatagtcctaggagatataatggcttttgttttttcgctaattcactgacgtatgttgtacttcgatccaggggcttggatacacgcagtgatacagataagagcttatcttgtacttatttcgctgatatcgttcttgttacgagatgagaacagaaagaatagaacagaatcccatttctcaaatgaagagagactcgatatctttgatcgtctgtatattgtagttgactcgcccaatgtacgttcatctccaatgccttccccttttggattgccaagcataattccacgggatatgattgggtggaacaacagcgcacagaccctatttagtcagcgcttagtgacttcatacaacgttgtagatagcgcatatcgcgcagggacgtatccctctattcatgcatattagcaatttttcagttcaactgcgtgtcggatgtgcttccctttttagtgtggttaggatctgcacttagacctcgacacctagaacagtgggaggacttgatatcctcaaaagcttttgcggccccttctattctcttggattgtagaacattttctaacagcagcatctagaagatgactatcttcacaggttttatagtggaacccatttctttcaatacatttctatacaagtcattgggatgtatctccatgatcatccttatgggttggctactatatcgtctgatgttttcatcgttgagcaagattccagggccatggtataccaatctgagtgttctttttctggtataccatgagtacaggggctcgaaacgactttggattcacaacttgcacttgaaatacggggaatctgtacgcatagctccaaatgaactatctttcgccagcgcgaccgcgataaaagagatttatacatctgcaggtggctacgccaagactgagttatactctctttttcaacatgggcctcacaggaatcttttcacggccctcgataagaaagaagtcggtaaagcacttggagattgagaagaatatatatcgttaactccgctacagcacaacgagaaaaaaaagagactagcggatcggtactcaaactcagcagtccttcagccagggatacaggcgctcctgcgtgatcgagcagacgcatttgccagggtttgcgccgtcaagaaaactttggatgtctatgtatgttcgtgtcagtcttttctcaatttatgtccatagactgatctatcattacagttatatctacattgctacgccctagattgtgtcagtgctattgtttttgatccatatggcacgaggtctatcgaagaaggcaatgacaacgatatggttcgtcatctctcgtatcataacagccgccctggtacgtatatcgtggagattgtaaaatgatccagcacacttattatattaaaggtttggtaatcaggcattatctaccctggttgcatcgcttctacagccgatttgatacacggtctcagaagggtggtgaaatgatcgacgaatatgcttgggcatccattcgaaaagaacctcattcggtcttcaccctttccacacgactactccagtaccctgagatagggacgggaaacatggtggccgaatgcctagatcatatcggtgcgggtattgacacaactggcgacgcactatgtttcctaatgtgggaaatatctcaaccccacaatagcaaaaagatgcaacgcctgtgcgaagagttgcgaatgtacagcctagaaaatggagatacactcatcgacctaccctacctaaatgctatagttcaagagacaatgagactttgggctccaggaacacagtctctgcctcggtacgtgcctgatggtggccgctgcattgacggtcactttgttccaggccatacaattgtcagcgctcagtcatttacagtccaccgaatggaccagacgatctttcccgattcggaagctttcaaccccgagcgctggcttgagatcgaagggaaagttgagaggcaacgtttgatgtttgcgttcggttccggtgccagaacatgtcttggtaaattgtgtgtctttgtgcagtattttaattgatattgatcttgactttttgctaacctactcatagtctcgcaatgtcagaaatgagacttcttctgcatgctgtctattcaagattccgtacccgacctgcggatgacatgaacgcatcgatggaaatgtcggatcagttgatgacatcgcggccaaaggacatgctatgcaaacttacctttgagcccattgagctttgaaagttgtggtttctctttattattactgcttcatccatctgtcatgttatctagataaggttatgcgaataaatttcactggtattgtattgttccatccgcggcgtgctcggattctgcacggcagaaatcgtattgtcaaattgccccattttgccgtacaccggggttgactgcgacatacggcagtctttaaatgccagtgcgagattttgcctgcagtatacatgtattttctagcataagtagtttgtacatctgaatacatcaagtgttaatttaaaggtcgtgtataatcagggtgcaatgaaaagccggcaaccttgtgagccaggcggttaaggttccctaagggactgccgatagagactgccgtactccgtcgggtcttcgcatccgccctccgatactattttccccctttaccccaacagaaaaaaattagagaatatgcaagcgtgcgatagatgtcggaggcgaaaatccggatgtgacaaagtccacccatcctgtggggtatgcagcaaagcgggtgtggcctgtgtatacaccgacagaacgaaagagcctccgatccgacgagatgtaatcgaaaggcttgaacgccgattacgccaaacagaagcgacaaatcgagcattgacagcgagattggccgctttcaattcgacttcaaacaatcagaatactccttctacgactaagagccctcaagcggaagaaagccgacacgaggtctccgatgaagtttcattcttatctctgaatgctgggggtgagcggcggtttctgggatccacgagcggtgttccttttgcagatttgataatatccgccattaaagctgatgcctcatctaatgcgcagctgaatgctcagggatccgggtctacgtcggcatctggggcgtccaccagggctgtacagttgtcgacttcaatcagagaaggaccaccagctctgccggagagtgcagctcgcgacctccatcgcgcatactttgaacatgatcacctatgctttccaattctctgccagcaatcggcaatggataatctaagaaaagtctatgcggaaccgtctacatttgaacggaaaccttacgagacattttgcttctatatgattctagctatttcagcttcgaatgttcaaaagcttcattggcagtcattgcccgaagcggaaacataccatgcacaagccatgtccagattgaacgatatcctagctttggggggcatcgtagcgctacaggcgatcctactcctctgtcaatatcaattgacaaactccacgcaaagaacatctggaagtctatggcacatggttgggatggcggcgcgaatgtgttttgagatgggccttcaccgggaagaggcgtataattatcgaaactctacaccagcctccactttaacgatgcatcctcggtggctttggtgtgtattggcaatggatcggtgagttcactgtgaacagttactgaagatgtgactctaacttttctttcgcgctcagcgtagtcagtattacgctaggtcgaccattcgcgatacacctagaagacgtggacctccaacttccagattacggaatcacacaacctttgagcacaacagaagggcatgagatacggccaacgggggagcagtaccgagaagcggtcttcgctcatataatccggtaccgtattctttgtggcagaatcatgtcatctctgcaccgaggccgatacaccaataacgaacattccgccttggctgcacaagccgagcttgccaatgacctggaagaatggcacgccaagacgagcgcattacaccttgaaagtggtgcctcagacggggccaaggtctccagtttcctgaccgttgagtggtacgagatgatctatcacaatgctctgctcatgttgtaccggccttctccagcgctcccattgaactcgtccagagcaaccgtggcagtgccaatcatatatgagtcggcaaaaaaggcgatcggtttctacgcacatcttcatgaattacagcgcatcaactatacctggattacgttgcacggtgtcttcatggctggtctttcctttgtttatgctgctggacagcatttccgcaccaagaagaaccagcgtcatggccagggatcacccatgctaagctccgatccgtcaattctggaaattgtcaacatctgccgctcttgctctagtgtcttggtggcggtatcagaacgtggggatatcgctcgtcattgccatcgtgtgttcgatcggctgagcgatgctgtgttatcagatgcggtcgaatatcacacagcacctcgacttggcggcttgccgcaaccggtccctcccacccctcctgcgttgtgcaacagtgtccctccaaatatcgccgcctcaaattacacaattgatacattgccatccgagggctggtctttccaggatccaatgctatcgtctctgcttgcggtcgatgatgtttttcgggattgttttgacgatctacagcatttccacgagtctgcgttcggtgaagaccccattggtcaactttcacaagattggttagggcagatcggtggttcgcaactacctgaaaccgacacatgagacgagtaagaaagttataagacatgttacatgatatttcaattgtacaaagctctagttaaatacatcctctctctaaaaattgtaccgggatgggaacaaccttacttctcaagtattccccaatccccttccctaagccgtcgatcctgctggagctcgcaatacccccgtccaagaagtctagtacccggaaatgaacggcgaaaatattggggaactcacacctttccacccttctatcggcatgattctcgcccttcgtccagtcatctccgaataggcttttgatccgggaaaccgtcaggaatgactgcagccaaggatattcgtcctgatttctgacgaagaaaccaatattggagttgtctgccttgtctccggatcgggcgtggacaatgtggcccaagggagctagttgcgtaggcccaaagctcgccaaatcgactgcatttgcagtctcgtaggaatctctgatatcggggtacttggaggttatcttcgggggctcaatcaaaatcgggctggaaacggtgcttcccaaaacatgtgtttggtggtcaagagacgccatcgagatgatgactgggaatatttccatgaacggctttgggtccatggtccggaagtcgagattcatatgatatccagggtagctctgcattcgtagcgcgtatattgggatcttgaacttctccgcacagatatcttccttctttttagcctgcgcgaaaacacgtaggaagaccgtgccagcctgctggctactgggatttgatgcaggggttccatatagctcgattgagaacttgctaaatttgtggtctcggaagatgtgcaggagctggttgcgcatcatctcgactttctccgagacgtcgagcccgttgatgtagaatgtagcctcggcctggtatccgcccttggctgcaatcattgccttggtcgttgccggtgggggagatccggtgataccatgtacgtgtacccgattcggggcgacctgctccatggtcacattgtggaggttggcaaccacgtccgggtttaggtactgttctccctggagttcgtacaggaattgagcgatggtgttgtgttttgtcacggctccggcatgtgcctcgggctttgtgatggtgcaacttccttcgctagtgatctccgcgataggaaatgcgaggtccaccagctcagggaggatagatttgaatccagagaagttggcacctgtcacatatggcccgcactcgatcaaatctatacttagttagtcaatttagccaattattcgctatacgaagaatactcacggcccgcaactaagccacctgcaagtcgatcccaatcatctcgagcccaattgtgccaccatgcggcagctccaatcactggtgatgcatccgtgactcgaccgcaaataatgatatcagcccccgctttgattccttcgacgataccccagcctccaatatacgccactccacagtatggctccaattgccagtccttgagtgcccaatctggatggtcgagatgcaagaggttctggcacttagcaggatcggttacagtctgggagatatcatcccccaaaaccatggcaatcaccacatccttgtggccccgcgcacgacacatctcctgcacctgcgcagccagagcctgtgtatttaaagcacccgcattagtaatgaccttgatccctttctccacgattagatcaatggattcagataattgcgtcaaaaagcccgcttcgtagcctaacgatggatcttggtctttggcaatggcgttccaggcaatgttcatctctgaaagccagtcaccgacaattacatcgacgttgccatcttgcgccatgcgccgcatggcgtgcgggctgtcgccggttgcgccggagacatttccgatgcggatatcgcgtttagggggcatactttttggattggatatgctgaaaattaaaataagagactcgcatcgatcgatctcaaggtatttgcctttctttaaagatcattgaacgatcgggctttatcggctcaatcgggttagcgctaatgtgcatcggaacccagtccgatgtttcggaggtcttggcccgacaggggagactaacacacagatttggagaagggagttggagattgttcaatatctgtttttattcggcctgatcaaaatgaagcgctctgtgctgggtcaattgccgatatctgtggcatatgaaagtgatgtagttatttccaagatcacacgcagcgcttgtttgagaacccatctattaatcatttaccagcaccatataagctagctgaaggatacttgtccttgaaaagactcccaaatgccaatcaatactgcagggctacacaaaggaaagcgttatgcttacttgaatcctgcatctttgctccagaccaggcggtacaggtggcccaccaatgaagtatacgatcgaagatctcgcaatctcgctcaatgattcttaggagaagcctctgcggaatcatcgaagtcttaatcaaaattggatcgcccgccataatatcattctgagattatcgagcccagagccaatcgcaacccgaggctatgctcgtcggatgcagcgaaccgggtcaaacgagtatcctcggctataaagcgccaaagaaatccagcaccgaatcatcgaggctgatgaacgtattaaacggcgattcatccttttgcctaacctggaacgccttaccgaaagtcgcaagtccgtgtctgttcaaactgagaccccagaggtatacacccactcaccttgtggtcatgcttcttcagttgatcctacggtgtggatcttgattaccgccttttcaggattcaagttggtcctcacttatgcgaccgtgcagggaatatgaaaagggctaaatggtccgcttgcagtttgaattgggcattcaattggcattagaggattggtgccacgatgggtgttttgagcggggattcatctctgtcattgtctgttttgcttgggctatagtttgggttatgtacatattatattggattgagttgcaattgcagaaccctcctatacagttgggttttcttacctatcgtataggctaagatggaacaatctcattgttattaacagttagttaatatgttgagggttcagattgatcctagaagtgttgatctctctatatttagtcagagcgtgtcggctatatgaaaggcatatcattggttggagacagtgtggatagccatgacgtactggaagatatttccaaggttgtagagaaagaaggaagcattgcaataattacgagtaaatcgaagctgtaaaagaatatacgcgcttatctcgtcaagtggaatatgcccaaaagggaaatcccccacggacaagtcacagccgagtcaattccaatcgcccggggagaatggacatgttgggaattggctcaacggagtattcaaccgtattcaaaggatctccacacgggaaatagcaaggtcagcaagtattttcccgagacgaagcccaatgagccggcggtattttgttccccacacgattgaaccggtgaatcaatatcggactgcccctctcagagtcatcctactatcaatctctcctttctctcaactcaccaccatgtcgcttcccattcgctccttgtcccgagcgttggttcggtcttacggtaccgtccagggttcccccagtgctgcttcattgaccagcatccccctcaccttgaccgatgctacgggtgctaccggtccccggaccaattggaccctagatgaggtcaagcagatttacgagacgccattgagccagctcacttatgcggccgtaagtgcaattcaccatatggcttgatgccgactttcagctatactgaccctatactgacccctctaggctgctgtccaccgtcgcttccatgaccccgcggctatccagatgtgcaccctgatgaacatcaagaccggtggctgtagtgaagattgttcgtactgtgcccagtcatccaagcacaacacaggtctaaaggccaccaaaatgagccccgtcgacgacgtcctggccaaagcccgcaatgcaaaggccaatggcagtactcgattctgcatgggcgcggcttggcgcgacatgcgtggccgcaagaccagtctcaagaacgtgaagcagatgatctccggaatccgcgagatgaacatggaagtttgcgtgaccctgggcatgatcgacggagaccaggccaaggagctgaaggaggccggcctgaccgcctacaaccacaacctcgatacctcgcgtgaattctaccccaccattatcaccacccgctcctacgacgagcgcctgaagacgctctcgcacgtgcgtgatgccggcatcaacgtctgctccggcggtattctcggtctcggcgagagtgacggcgaccgcattagtctcctgcacaccgtttccagcctgcccgcccaccccgaatccttccccgtcaatgccctcgttcctatccccggtactcctctcggcgaccgcaaaatgatccccttcgaccgcttgctgcgcaccgtcgccaccgcccgtattgtcatgcccagtaccatcgttcgcctggctgccggtcgcatcgcgctcaccgaagagcagcagatcgcctgtttccaagcaggtgccaacgctatcttcaccggtgagaagatgctcaccaccgactgcagtggctgggacgaggaccgcgccatgttcgatcgctggggatactaccccatgaagagcttcgagaagcctgagcccaaggctgatgccactgctcctactccacttcctgtgcactccgaggctacttctgcgccggtcgcagcgagcgcttagacttttagttagactgttgcctctatatgactgcgtcaatagtttggatcgggatgatcctgcaaaatgcaatttcaatacactcaatgaaacctaggtcctctatgtagttattccactttaggtattggtcatcctaaacccatcttaagatattgtcttgccatgacaaccttcaacttagaacccaatgccaaagaccagttagttcgctgggcttgatgcttgcatggagatcaaacctacgcgacctgtcctcggctacggagatttacacccctcatgtattccgtgggactcgtcgactggcaatgagagccacgactttaggaacgtccacgagaaagcccggtttgatgtgtggtgcagacctacatggacctcatacatatggtaatgttatgatccctgtggtaggtgaagcagcatgtgctacgggtccctctgcctgcgctgtctcggggggctacggtgatatggtggtcagagagatggggaggagagaagaagaagagaagaagagaaatgggggaaggagtccttttataccctcgacaaacggtaccttcctcgagtgcgacagctccctcgcaccttccctgacaatgtcaatgtcacatgcattgcgccttctttgtttgttcacacgaggccccaggtttaggaaggagccttcaagtcaaacaattattccttttggctttgtcaccgatctaccccaaagccattccgcatatcagaactagtcatcttgaccgttcgtcaatacctcgggctcaagctcatcatcattgtctgtctcgtaatctggatcaccaagctgaatccgcttccaagtaacctttgaagcagtcttccactcagcctgctggaagtctggcctcggctttttatagctaaaccgatccggatcgcgccccccacggatttcatagtcctcgatatgcacaaatgctcggaagtgtgaatagatgaactcgatatccaccgcttatcccgagtatcgcaaatatggcagtcgcttcatcaacgaaatcacaacggggttgaggtgaagctcctcgcacagggcctgattaatggcgtgacatcctccggggcctagacgacctccagatcgagatgtaattcagcggcaaatagaggcgataaatgtcactgatgatgttgaattgtatcggggatgcgaggaaagtcaaagtcggcaatatttcgtccttcggggtccatgactccacgtcgactttagtcctgcttgtaaattaaatcccgcatttagcgcagatcacccgcactaaataaccggccatgtctaccaattagctatcccccattttatgaagttatttgtccagtcaggtgacactccctattgagaagcggtgaacacaggcaataaatgaattgacgtcgctgctccactcttcacgaccaaatgctgaaataccgaggctcaagccgagtgcacggtgtcgactcgacccacgtcttctgagtctattcagtagaggtcaatcttcacaccacaaatcgcaatgattgtcattgatttcccttttggtgtcaatgcgactgcgttttgatgtcaggcttagccattcccaacgacataatctgcagccaatcctcaaatgagcattctctaccgtctcctgttgggtaaactgatccatatagggaagtgaacacacgtcattcaaatgttgtgtaaccagcgccctcgtgggaatgatataagcaggatggccgctgctatagatgacagagtccaactcgagcatccatcatggattctaaccatgctaaaccgttatccaaagattccatgcaatcaacatggcgcacagcacctcgcagcgagtggaacatctatcatcacatgctcgacacactcaacgcctaccccatcgacataaacaaggaggtaccagtgcatagcaaagatgataaagtgccacacatgccccagtggcatcttcaacgctgggttctcttctactccgccatccccctcctcctccacgagacctacatggcattcaccggccgcaccataagcccaatcgtcgcagtcgccttttacgtcctcgccttcaacgcgatagtgatacacgaaatgcacatcctccgacgtctcggccacaaatacggcttcctcgacggcgacaagcacgcacgggatggcatccccgacgtcggcatcggcaaagtagttacctcactatacaaactcaccggatcccgaatgatcctctcaatcgtcctatcctacgaccaaacacaacgaccctcgcagatgtcctggagctggctacccctcgaactcggactatacggtgtcgtcctcgacttctggtactactggtaccaccgattgatgcacgacgtcagctatctctggcaataccaccgaacccaccacctgaccaaacacccgaacccgctcctctctgcgtacgcagaccacgagcaggaactcttcgatctgttcgttattccgatgatgacgtactttagtctaaagctggttggtctgccgatggggttctacgagtggtggatctgtcatgaatatatcgcttttggggaggtgtttggccatagtggattgcggatgcattcgggtgtgccgtcaacgctgaactggttactggtgaggttcggggtggaaatcaatatcgaggaccatgatttgcatcatcggaagggctggcggaagagtcataactatgggaagcagacgagactgtgggatcgagtttttgggacttctatggagcgtattgaggctgtggaggggaatgtggattatgagaatacggcgaagatgcctttgttctaggtgggttgtgtgaatgatgggagattgaagggaatgctggtgtggttttgagtatcttatcatgaattatgacacttatgatataaggaaatgatggtatcgctctgtgtagtcaaatcctaatcctatatattcccactacttaggtttctctcttcttcctcttctcaaccctcaaccctcaaccctcaaccctcagttctcaactccaaaagatactacccaagcagctacaagccatcatctgtgtccaagcagaacattcgacaactcaccgaaatgttcgacttgaagctccgtcagctttgatcgaaggaatcgagacaacgaggaagagcgcgccccagtgtatagtcctatgggagacgtctatgacttttgcgcgattctagagtgggctagtgaatcctagtctcgccgcgaatccttgtactggatgtgggcgttgaggccaccaaagaactctgcgatgcgtctgcgctcacgatcccacgggattttcctagatggtctcttcctgcgaccgcaactatgaaccggcatacgtctgatctctaaatctcctctcagagatcatgggtcaatacgctgatctagagagccgctacggcgttttctatctcatcttgttttctttctatctccggtttctgatatcttaccttgatgcgaagtgactgggtcgcagtgatacagctgagaagatagaggctaagagaatctggccatccggaggataatctgccgtgtttgtccttttgataggctgcatccagatacctaagtggctctctgtttgtttgtagagaatcaacttcttctctctctctcggcttcatgagccttagaccagctctcactttactcaatgtgagactgtatcaatcgaagctgtgaatttccattcaattctgtttggcatttgacttttttcggggaatctgtatttgaattaacttatgtctaaataaaattcttcaaattggttgggtacatagctgaaagtctgaatacccaacaagtccgagatgatgcttgttgatagcacgctaacctcatccacatcgctagcctgtattgatagtcgaacgtgaggtctagatcgaagcactaaacccctgctctggctcaaacccagggccattctaccaacacctcctttgagagggattcttcacggtgttcgttgactatgtgcttgatgaagaagccttcgtttatctgcgctgagatcaacctgagcgatgatgtctagagaataaaattgagagctataattataccaaactctatcaacccagagcatgaggtcggcaagaatctcctcaattctagaagtaatatcttactagtagtatgactagtggatgcatctcgctcaactcggccatcgtccgataacgctagtgctgacctacacgaaccattacacacgatcggcaagtattttccgagccctagctagctcttcccctccgtacctagtcaaagcgtcctactagtcccgggaataccaagacaacatgtggcgtgtgtccaatccccacagtagctagcgcgaaatacgtggctctttccacgaggtggggatatatatgactgtttaaggggatgcgtcggagcaaagagagtttagtacgtgtgcactatataaacagctccactgtgttcctggtatcagggccggcgatacccacttccgcgaatgagaccgctcgcagcagcaccgcacaggacgcaggccatgtggtcggctcatgcacaggatctggcatagccggtttgatcgaccccaccgggtcggcactagtagtatggaaccagggggctgggaatgagggaaaagggaatcgagggtcgaatacggagtagtaagtatgagattattacgcacataaatttcatagcgttcacaaggatgtgtgtataggtacatattcgtgacggcgtagctgatcttacaaatctggtcctagaaactaattatacacttcaactcccgaatgagcgatccttctgcataggcggtctgacatccgagaaaacagaaatctccacctgcttcgtgatgcccggaccggatgaagtgggagaatcgggcgcgccttcgatagacgtgcccgtgcgcgctgtgtgctcatggcccagaatgcgatcgatgctgttgttctcgacatcggacttgaacctgcgcgtgcggcgcgactgattcgtctcgtttggggcaccggtcgttttgcgcccgctgaaaggcatgccgagttcgtaggtgtgggagtatttgccgctggagagcttgcgcacggaggacatgatcaaggggcggatgcaggggaccgaggaggtgattatgataatgacgttttcgatgtatccccagcggattagttcgatgccgcccgcggctccggtatttgtgatgctaggtacggagtccagtttggttgttttgatgatggacgcgatcatcgcactgtggcagggtcagtatattgtggctatacggtttgggtagaggtacttacacaatgcctaagctgagaagagcgatcaaaccgagcttgatgggtagtttcaaattcaagttccagaacacgactgtcgggaagacggccaaaaacagatcggtggctgagttgaatgtattggagtagtaggcgaatttcatcacggcattcaggttgccgcaggtcgtcgcagcggcgactgctgggtcccagagagcggctacgttgcgacagatgctaagcggtagcacggccgatgcaacgttcccggcgaattgaatcgccaaaacaacccataacgcggcctggtagtacttgtaggttccgaccagggggatgatgtagataataaatgcggagcgggcgatggtggtgctgatggtgacgatcggcacctggattgcgatggattgcgatatttttcaagaccgctgccttgtcgtctgcggttagggtgctgagattttgaccgaagccgtgccgaaccgacagggtcagaaatgcgcttgatacgattgcaaggatctgtagagcattgacgttagtcgagggtaatccacaagctagtcagggagatctgcatacctctgcgaagatcatcagtccatcatcgatgcgaaaccgattgatcttgatttttccgaccacgcgtaaaataacgatcaccgcagcaatggccaccgcagcccaaattcccctctctagggatgggccaagattttgtgacatggtgggaatataaagaggctaactggatagcattgtgaagtgatatataagagatttcagttggcatgacgggtgagagtccggaagaagaaagagcttagcagtttgtgtcatcaaccccggaaagccttggagaaaacgattggatttggaaagtcaacttaatccatcgggtattaaaccgtaaccgtggaatgctctaagatgatctgtggttgagccatggactggccaatctacgaccttggctggagtaggtttcgcgacgatcatttctatttgagtcaaaatgagccttcgagtcttggaagttgcatgttgcctattattaatccggtgcaaagtccccaaagtcaattcgtgcatggctggttctctctcttaactgcctctttgggaggattgaaaatgcgaataggacaataattggttcacgtatcataatgtcatagtaactgtcgagataaggccctataaaatacccctgaactacggaattgttaaacgaagcctcaagccacaaagcatacaatatattaaaggctgacatcctgaggtggggtttagtgggtttaattaaacaccgattggaggaatttcatctgcgttaccggcgcagtcaaacaccgttgaaatataaggattggcagaggcttcaagtaaaggggggttctaaagaagcatacagtccgaacctatatcctcctatagtggtaagggtcttggcacgaggtattcctcgtttaccccggcagaatcccgacgaaaagggcggaaggtagggctagaccaatagaagtatggcagccacgtgggcggtagaccttaaaactcacttcggaaagtaagtttgtccaatatatggggctaagcctgattgggcagccttggcactctttcccacggtcagaaaagtctggaagcgccaaccttgggattcctcaaccttcaacattccgaatcttggaatgaccggggttctctccaagtggggattcgacggggtttgcctgaagaactggatcagatcctcggcatttctggtctatccggggcctccgtgccgagattagattaaaaagctgaggttcgcaaaaggagaatagcatcatgttcttagaataacgctggaactcatctccggtcaaataactggataactatcgcaactgacatgtcgatcacgcgtgcatgaacactattatattgcacaagtccgggacttgtgcctgccgttcaacttactatctcggtcccaccccggcgaaattgtcccacatttattgattggactagacgcactaggaaacatctccgaatgttcagagattcaggttcattgcaggaatacaaagtcaatgtatatagacgggaatgatcggcacctgtgccttcatttctctccaaccttatccctttcatctcctccaccatgaagtggacattgccttccctcgtggctattgccgccccggctattgcgtccaactgtcactgtttaccaagcgatagctgttggcctgccccatcggcttgggcatccctcaaccacaccgttggtggtcgcctggttgctaccgtccctatcggtaccccctgccatgcacccaactacgatgctgccgcctgtgcagcgctcaagaccgactggaacaaaccccagacccagtaagtggtgcgagtatggcaaaattgacatcgctaattgccccagtcttgagtcctcttcatcggtgatgcaaatgttctttgccaaccagagttgcgacccatacacgtccaagaataagccgtgccgcctcggcaactacgtgaactacgctgtgaacgtctcttccagcgcgcaggtcattgctgctgtcaattttgcccgtgataacaatatccgcttcgttatccgtaataccggccatgagtaagtcgcctcaataatcctctacagataaatgctgattgatgtagctaccttggccgttcaactggtgccggtgccctctctgtttggactcaccacttgaatgatatcgagtaccaggactggtctggtccgacctacacaggccctgccttcaagatcgaggctggtgtagttggttaccagatcctcgaggctgcagccgccaaaggcctcgtcgtcgtcggtggcgaatgtcccacggtcggcctcgccggtggctacacccaaggcggcggtcactccgccctcagcagcaacttcggtcttggtgccgataacaccctagagttcgaagttgtcaccgccgctggcgacctggtcaaggcctcgcgcaccgagaaccccgatctcttctgggcactgagcggtggcggcgccggcaactacggcgttgtcatctccctagttgtcaaggcataccaagacgcgtccattgccggtgccgctcttgagttcaccgcagctgacatcaccaccgacaccttctacgaggctgtttcgcagttccatgctctgctgcccgccatggtcgaccacggtgtgactgtcatataccagatgaccaagagcgtcttcatcatcgaccccatcacagcctacaaccagactaccgatgacgtcaaagccatcctcgagccattcacctcgaagctcaccgagctgaacatcacgtaccaagccagcttcaccgagcacgactcgtactatgaccactacaacacgtacatgggtcctcttccttggggcaaccttgacgtgggcgcctaccaatacggcggacgtctgattccccgcagcaccctcgagcagaactacaacgggatgggcgacgcactgcgcaccctgacccagggcggcttggtcgccgtcggagtcggcatgaacgtctccaacccagtcaacgtctccaacgcagtcttcccagccctgcgcaacgcagccgtgacgatgcaattcggcctgccgtggaacgagaccgcgccttggtccgagatgattgcggaccaaaagaagattacgactaaatatgtgcctgcgctcgaggctgtcactcctgacagcggctgctaccagaatgaggctgatttccgccagccgaactggcagcagaccttcttcggaagcaactacgcccctctgcttactatcaagcgcaagtgggatccttcgtcgttcttctatgccctcaaggctgttggcagtgatgcctggtctgtgtctgattcggggcggatgtgccgtacttgagcttcttgagctagcagatttcatttcatagcgatttacagttcctgtttagatgttagagatattttcctattgtgttgactaattttgttaccgaagatcatgcccaaacctgcacatacacatggaatatcatctctgtcggttcttatccgaagctataatgcatctttttgtagcccttattcatcgaaaaatagtatcttaaatatgctcgaaatgctcaaagccaaatctatgtacagaaatctataaccaaatcaattgatatcgccaagtagcaagtgtacatcaaaacatatatatacaaacaacaagcctagaccgcagcattattaccgcaagagaagctgtcattagaagagtcatcatgaatagccttgccggaaacataaaggccaagaccacacatacaaccaccaatcagaataacgcacaagttcacaacagtgagagcaatcttccgcggcgaagagaaccacttgcccttattaatgaacaaccaatacacaccacccagaccataactgaaccaactcgcgaacagcgagctaatcaaactcagcaaatcactgaagacgggaatggcatcggcaataacccaggcaataacccagcaagcaagaccaatgcctacccaggaaccaatggcaaccaagtcacgcttctgcatgcggtcggtgcctcggaacatgcgcacgtagatgtacttcagaccgatgtggccgttgacgacgccggcaccgataatctgagaatgtcagctgctggatatgggatcggatggggagaacgtacagttgggatggcgattccgtaagccacctttttcatgataggacctgcggatccaagagcgggggatgtgacctcctggccgacatagtagtagatgaccaccgcagcaacgacgtagaagacaatttcaaaggtctgcagcatgaccagagccttggggaaatccctcggttcctccatctcagcgagcagaccgaagaaagccacgtgggcgcagtaggcgaagacgatgttggtgacggcgccgaaagcctggaccaaatcggtgtcgacggtagccttgagattctgaccacccttgttctgcaccccgactgcgaccatagtgatgatgacagcagtgacgatactgataaaggctgtagaagacaattagtgattattctctaagtaaggaaaatctggtacgtacacatgcacgagatataggtcatgttcttcatagtacgaggtaaagagcagacgaaacagatgacgaatccaacagctgtgaaaaccatcgtgcaagtgccgtgttcggtaacggtattcatcatgacgctgaaagtcaagatgtgggaagccataatgaaaatcgagaagagcagctggccgaggccgaacagctcgcgtccaaaagcacctaacaagacctcgccggcatcggctaaattctggatatgggggtatcggttgcggaattggtagattgtgtatccggtgtaggtagcgagaatgcccagtccgacgatcaggatgagagctggggcaaggcctagctgggcgagggtcttgggcagggacaagactccgagagagacggattcggcgatcatgactagatggtggtcagagttggttcattgtacctaatcaactgataacagttttgatcatgcgtgtggtagcacttacacattcccgtttgcctattacggaattagcctatatccttgaagatggtttcattgcgtgtacttaccaccacttcatagtcttatacttaacctcggcaccctcctcatctccaaaggcatcctgatactgtggcctctcctctagaatcttcttctcattataccccgactccgagtcagtcgggtcctggtagggtgtcactccatctggaatcatgatgtcgacgcgtatagagccaaaactggaatatagaaaagacagaaagaaagagagagcctagccacttgtatatgtgcaaaaggaaaaaaattctcgaccagaggtggatctttcctcaacgtctgagacaaccccggcttcacttgtatggagagttggagggcaaaattctggagcccggatcttctggaaggtggggatgtaccgggctgaacggtgaatgaatttatatttcctatttcctatttctaccatatttagttaatattgcggctcactgagacgaaaaaagagaaaagctttgatgccaagttgcgatcatataaattaagcgtagggagacccgcttctgaacagatgagtggagtcattatgacccgctttcctgaaaatgggccaattacagactcggctcggaattctattatctaagaagaacgccggactgcgctgctggccgatggtagccgcttccaagcttgtcccgggccaatcccgagtaaatggcttcgagctgttactaaatgccaagacgtgcagccgtataatcgtggttactctatgcaacttatgtcggttattgggaatatggatgaacggcatcgtacgttgtacaccgtacctgagagaaggcaaatcttagggctcagtagccagaagaattccagtatacaaagagcaactgtgggggagtgaagctctttcgccaccaaaaaaatcaattctagtcaagccttgccaatctcacctaggcaatggttcggttatttcgtaaagccgcatatccgaaggataatgcaggccattggggcagatgctgctatttgtttggaccaaatagacccattattataaataataactcaatgctttcctaatcgggactttctattatataccacttaccgaaatagacaatggagtctccgtacctatgtattgtgtatattgtacatcgtacctccctccacattctggtccctgcatctccagacttaccccaggttgcaagcaattcaaacgtaagtgaatgttcaaacgcgtgaataatgattatccgcactcgggctagtcgtaaaaagcactccactcgtagttatcgtggggtccgtcttgtaatttagttaatgagagtgttgctgctccacaaactcctcttacggtgtatctatccaccgaagatgaattcatgaaccaagggccggaattatccgtgaatatattgactagttgtccacacccgcagaatagccgtaccccactaaagtagcgaaggtggtcttaacgtcgagattccatggggccgacaacgtaggcttgtgcaatatactattctgtagggaatgtcattaagttgctagaattgacttaattgacttatccatggtggccacggtgtgtacatcgcatattgtagacttctaggaaactttggcctgggctttgagtagaggaggtgcctgggtgttgaattgaaattccgtctagaagctaccgtggtcatttcctcggatttcctgatgattggggtccagtcagatatgtcctcatcgtcgcagctggtgcatgtgtaacgtgtcgaggaatgtgttcagggcagtcgtcgtggtatgatttgcctcgacattagttgggtttgaggtacacatgagaactctaaaaatagcctagaaaatacattcaaagatgaacgattctaattaatctgatattccattagatcagatctgtcgctcaagcttcatctgatgaaacgtcctgactacaggggaatggagtgatcaaccagaagcagaaagatgaagattgatggaagataggaaactagctactgtacagcttcgtaccacaaagccagctagtgttagaacacttctcagaaggatatatcaaggtaaaataggttactatagcgagcatagttaccgatagatctactaaggcactatctcagtccaacaagcccatactacacttcctaaggaggtatatcggagtatacagaccggcataccggaggatcaattaatcctatatgttttgtaatttagttgatataatcatggccctgtaacaataaattgtgtgaggggggccaatacagaattccagacaattgtatactattgattagacggccaatttttacacatacagcacagtcgacatatgcagtcattccacgggtaccgtacgggaaattcaccagacgtacctgtctataccatgagtgaaattgtgagaacgcgttaataatagcttgtatatggcttggtagctccagaccatgactctcctttcgagcgagtatggctctcgggaggaaatgagtcacagcacggcttgctgaagagcacgggcggcatggaaggctatagctcatataagctcgctcttagtgctccgcctctcctagtccaagcattctaggcctagatctagatctgacagtgattgcggctgggttcttctttgatttcattggcttaagggtggtgagactcggcaaaacaatcaatctcaaccccgcaaagatcagacgaaaatgaagatctcgaagatatcgaggtattactggctggagactctcaaaaatcactttttaccatagatgcagaaggggtgacgctggaaaagttgaaaaattgtaaataattggattacagtgtggctgaccacttaacgtattcggtaagcgagctgcgcagtaaatgcaacatattccacatttatatctccacaacgacgtttcaacttgcttttattacttgtcgatagccatcgataagaacttttagcaatatatctcaatctcagagaaatcggaaagttgtatcattgcggtattgaaaattacatcactgaactataagaaatatatatatctcaatcactattacactaaatttctcaaaactccctagagtgatcagatatcatatggagagcaatatgctacaagatagagttcatattgaccacagttgttgcattatcatgttgtaatttatcgcttttactatatgatttggggtgcgcagctcgcttaccgaatacgttacgagataagactcgtgtcaatgctaatactactgcacttaactcgcctgcatgaatcatagagaggtctcgtatagcgacggcatctatcgaaccaaaaacaagagttgaactgacatacatctgcatgtcgtcggcatgacttgccttgtcttgcagccaaccacgtctagactacgttggatcctggagcaattcggcccaggcttcctaatctaaagccggcgctcggatagtcgcccgtatacaagttacgctggagtgatagtggcgtttctgattgcagtagccatgtttgcccgggcgtgcgcttgagatgtgtatgcttgctttttactagacaggctattttaggctttgctatataaccttagaaaactatctactcagggatttctctcatttattcatcttcccacttcgatctgaacactgtttctccctcaatctcatttcccttgggacatccatacgaacggacatcttcaatcctactaggggctgatcatgaagaacattcgtaagagacatgtcattcttgtcgatggaccatggtacaatgatgaaggggagctccgtgagtaatcgaaagcctagtcccttgacgtgaagttacccaggctgactgagtccagactatggtagtggcggcaaaagcacaatatggcgaatcggctcagcgacgaaagagggtaaggtagctgacgataagggagacgtaaaccaggtgaggatatatcatttctatcgggcaacatgtctatagtctcataatgtgactgacatattctactgcaggttattcgatatttcaaatcgagtaaaaagtccattatcgacagaacgaaagagcttgtcgacgtaagtaaaaaaaaccaatcactatcccttctacaagctaacaaattgtggaagatttgcaaatcagcaagtacggaagatgagatatggcttttcggatttagcaagggtgcatgtaagtacaacccttcttctacaacgaagcctcaccaagctaaataattggtcccaatcagtggccattcgtgcggtggtagatctcctttgggctgccaaacgtgacgaacaccggcccgtacaacgttctttctcatcattcttcaaattgaagaaatcttcaagttcgctggttgaggtatgtcaaatgtcgtctttatccccatgccttctgatactgacctggcctctattcagctcgagaaatggtaggaacggaactttgggacttgaaatctagtccccttgctaatgtatttaggattcgtgaaagtggagcaaagaaatgcctgccaaaactatgttttgtaggactatttgacacgatacatgattcatccgtcgatcaatcgttgcaatggccagcctcgatatatctttatcatgcagcttctatgcatgaagatgataacacacttaaggttcgtctgcttagtgaggatgcatcaaaaaacgcttatgaaacacccaaatacgttgaagcgtggttcgcgggatctcatatagatattggtgggggcgcaaatcaagatggactttctctttatccactgcagtggatgttgatcgaagcccagaaaaaaggattatgcttgaacaagcccattttacccgataagaaggaagggcaacttgttgaggacatagtgcaacttgtttttccatcaagcggaaaaaccttggactccaagtcatcagtgatcgatccctggaccttgagatatgccaataacctcacgatccagctatacaatttgcgtatttctcaccagcacggtaacttgcaacaagagcaagatcagcgacctaaaaagaacgtccttatccaagcaagaaaggagccagggaatcatcgcattcccgcaaatcagcgacacaacgtcaagttgaataaaacgagaccctatacgcaacaccgctatggaggcagtggatcaatatatcgagctatattcgcatctgaagaaaccgacacgccgtctgcgtctaggaatgaactggttggttattctcatgattgtaagtcaatcaaagaagcatctgagatgagaatatacgctcaaaccaacgtcattaggtgcttttggggtagtaatacacccttcagtatattttctgatggatatctatcctcggtatctgaaggtaaacgaattgcccagagagctttccttggacctccaaagattccgagaaacgaagttgcttaaagagaagcaatttgacccctgggtctcagcatacaatttggatcatttacccaaatgccgcatccttgtttgtggagccactggggttggcaagtctactcttcttaatgctgtgtttggcattgaattggtaagtaatgtttcagaaacgagaacttattagacagcatctaattgatagcagacgcaaacaagcgataaagaatcggtttctcacgatatcaatgaggcattggaaagcgatttgcaccccggaattatcattcatgattctcgtggtttccaatatggagaatcaaaagaagtcaatatattgagagatttcattgagcaacgccaaaagtcagcagacccaaacgagcgactagacgttatatggtatgtaatctcaaaccctggaatgttcatttctagcgctaaagttattttaggctttgcatagaagtatcctcaaaacgacgccttcaaccagcccacgctgagcttttccatgtgttgaaagaattcgattgccatacaccggttattgtagtgagaactcaaatggacaaagagcttaaggaacggcagtttgatatactcggtgcggcagcagaaggccagaaacagaatgagtcaaaagaaccaaatggactggcttgggaagtaatcaaagcacaggctgagaaggagtttttcgaggcagagcggccatttgaaatggatgtcaaaaaacatgacccgaaagcttgtgtggttcatacttcaaagggtaagatctatgactctgacctgaattcgacttttcagctgggggactttgctaaatcttacacagataccgattcttctatacgaaaacttgtcagaacgactttagaagaagttgaaagatacagtccagaaagaaaaacttctgtcgcggctgccttgaggcgtgacatggattttaaaatcggagtggccattcaaaggacgtttgacatgataaactacgatgcccacatgtggcaacgagtcatagctgcaatacccttgactgactctacaacaactcccataatgtgccgggtcctctgttctcgtattctgtcttgcttcgggctacccaaaatcccaccagacgccgcggcacacgtgttttcgaaggttattttgcgaaacctttccaggttcatgatggaaagcatcggcactgacttttggaatatcctcgctggtgccaacaagcttctcctgttcggaattgctccaatacccaaggcaatgtggcctgccgctaggatggttgttaaatgtgcctgtgatgtgatcattatccttgatggagcgatcaagcagagtggattcatggcgactcccgaaaacctgcatgaagttcaaatggcttacgcactgaattacaacccagatgagcttccgggtagtgaaaagatgactctaaggcagttgacccacaaagatgtcaatcgtgagttcaagctgagcaaagaatccaatcaaaagctggagtatcaggtcgccaggcacaaaatgatgaggattgtcatgacgcacagactcaaagagaaagctcacttccgggcttcagccccgagtttctatcaagagacagaaaatcaagacgccctggatgcattattttcgggggattcaaacacgctcggtcaggagattgatgctctagctcagcttggagcagacgggtgtatgtccggtcaatatgacgaagaaattgcagatcaatattcagaatacacgtatagccaagacatggacgattcattgtgcagaagcagtgtctgctttgatgactcggcgagttgaaattgccatacatgggtggaattatacacatttgtctacaatacctttcggatctccggcatttctctggtttaatctgcccttataatcttgactgtctcggatacttgcttctgtatatatctctacggtagcattagggttctacttcagatacaagataaggcttcatattcgaaagatgatcaatcgttgaaagacttgaacagattgagtagggcaaggacagagtttgaagttccatataatcgatttaatacggccacgctataatggtttctactttaaagagattatatgtggccagaaagccatctcgagttcctgctggcacgtagatcgtggatggacacgcgaaagaagctgcgcaggggcccgaagaaccacggaactccctcaatcggtttatctgccttgaacgaacgcgctagcggctacgacggtcgagaatgatgatggggttacagggcgtgtttggggtagatggtatgaaggtagagcagggccaggaacgttcattttaatgcggtgcaagtggtcaattgttgttttgtgtctacattcggatgggtcgagcgaaaggctcggactatgagaatgttgtcgaccgtagaagagggaacgaagttaatgggagggaatagagtaattaactagaagtagaaagataaagattgatacaagataggaaactagctactgtactaaggcttgtctatatagcttcgtaccacaaagccagccagattccatctactagaacacagaagaagtatctctacggatatataaaggagacgccgaagcgccaagctgcgcgtttgccggcaaactgtctgccagagaagagaaagagaaggaagtaatgccatacagaaggtctacaaactgcatatggcaacagtgagcacgtcagaatacgtcaccatcggactcatcatacctcttccctgccagccttgtgaaccacaacagagtcaagatctcaggccttaggattcgagcctggtagttgactcggtaaatcagtatgagatgatttagccggcacagcgatgtgacccaattcagcgtcttgatgagaacttcccgacgtctgtggtaacgaagatgatggatgtcttcgtcctttctttttccattggcgcctgtaaaataggaacgcgccgacgaaagcgagcactacgccagacgtagcaccgataccgattccagccattgtaccccttgaagtattgtgtggcgggctataggtgctcctggggcgtatgctagtactcgtgcgggttccatccgcggtactggcagcatgcgctgcttggatcgtcgcaaagccaagacctgcaatcgttggcaatgcggcactggggttgataggccagtatgcattgatcgatggacaggaaggagtaggaagcgtaggtggagggagggtatttgcagtcacggcagaccaccttttcaacgaattgtagtcggccagggttgtttgcgtgctaacctcgaagagccgcggcgcatggtggttgcagctagtttcagagatgataacgggaacccctaggcctcctagcctcgacgtcaatacatcgtagtcagaggcgctcatggacgagttgcacccgagttcgttgactgcatagaagtcgatagcctcgtcactttttcctccgcacaccaagtattctcccaacgtttggatataggtatactctgaatctgtggcgtatccaataggtatagcgcggtacttcctagcagcagcataagctttcatatcccgggctgcggcctttaggtatggggctaggtcgactgtagggcctatgtcatacatttagtgagcgcaaagactgtgagcggtgggtttcataccttgaccagtaatagtttggctggaaataatattatttccaataagaagccccaggagattgctatacccggccattgaatcaagaacagccgcatattgttcgaaaacgcccatttgccatggtgagttgaccttgcagagatgttagtatccataaagaacacacgaacaaccgaaaatgcttactatgttcgagctgacatctgtccaagccctttgagttgccatgtttgcaatcacgtatattccattgtcctggaaagtctgcatgcatttatcgtgaccctgagtcgcatctgtatagtacaccctgatagtgttggccccgagtgccttgaggataggcgcatcgattgcgcactggctagccctcgaatctgccaaaacatcgattgtagtcgaaccagaggcatctccgatgtaatcgacacctgtttcagatgttatcttggcttggcatcgataacacagttcaaatgatcttacctttgatctgaaatcgatggcccctactcaataacccattccccgcgaccgagataacaggcagtgacatctcaagacacgaagacacaaaggtggcaggagatgataaacacggaaaagactgcgggggaagtgaaaaacagggtccgaggctatatctagggcgccatggcccctacataggcttgcccaacccggtatagcgcttacatgtgaagcggtttttaagattgcaataagcccggttgataacgaatcctaccttgaggtcatggcgtatcttatagaagtccaactctcacggatataaactgtggagctacagtcccttgattgtaggatccattcatccatttttgcttcatattgctccgcgttattaaatcataaggtctttaggtgttatgtacgccagcggccttccagagccagccccggacctgcaaaaactcgctcagagctcagagctctgtctgccctattcgcaccctaacaacacttcgcacccacggaacttcccatttactactcgttcgcttgcatttttactcacattaaggatgacacggtgaagggaggccacaaacggccgcttttgacaccattttaagccgctcacgtggccggtcttggcgtcacgtgcaccaaagcccacgacccgctgcgggttagccgtgtctggttctacgtatcttcaacttcccctgtatatacatacatacactcgcaagattgaatccatgtttctgtaatggggctcgtcgaactacccactgagatcctgtggatcatcgcatcatgcctttgccgctaaacggatatttacgccttcgtccacaccaatcgtgatctatacgaaagacttatcaagtctctatattactttcacgcccggtatagacatggagccaggctctggtttctcgcccagcggaacctctttttacaagttcaaagtttgctagacgggctaaatgctgccagcaaccagcctccagcatcccgggcagtgatagaagcaacggaacggaaacctataagaatgtacgaaaaaggcacgatgctaagaatgtaggaagaagaagaagacacaatatacagaatacgagaaagtctggaccctatggatatttctacccaccctcttctccaacagggatacagcatcctgggtattaggaatatccagcatgctctagtgctggcaattaagggtggctataccgaaactgtgacccttttactagactttggtacataggccaacttctacagtagggaatctatattggctacttacaattagtggtatactaaggcgattgattacccgcccctctttactgcggtatagcacgtgagggtagaactagtgaagttactgcttcagtgtggtactgatctagagctatttgccccttcaccattatatcgtgctgtcgaagataatggacgggaaattatccctatattactcgaatacagtatagggccgtaagtaatagcgttaaagctagctatactaaacgaggataagtctatagtgagatttcttcttaatagaggattcaatatttcaaagtacggacatactggactctatacagctaaaatgagggtgacaaggatatgatcgacttattagagtctcggggtgtaacattagctgcacttactaatgctgaaaaggaaaagtgggagacggcagacggggatggcactctgcctctttttgataatgtgtttatttccttcgaggacgaggtcgatctggatgagggtgagggtgaggatgatgagttccggaattagtatgagtattgatgggtacattttcctgcatcacatattttcaaattggttccctttatttttttctctcttatattcctgattgtacaaacgaatgcacaactgcacaactgcacagtagatatgattaggtattcacgtctatagtacctacactaatgctgaacggaggagacgctccagttctcgtagcgactcgggcttggaagtgacactagacatcaagtaaagcacgtttccaaggacgcgcgagtgaacattgaactgatcaccaccaacagccagcttctgctgcagtccctttgcagcattggagttgtagcctgtcatatattagctttatcaatgattcaggtctgaagaacataacatacctccaccagctgcatcacgcagtgagatactcagcacggttccaatggcgaacacgctctccacggacttcgtggaagagaggtcctcaagcagaccatgtgaccagacactccacacctcgggagctgaagattcaacagtagcaggcgagctgctacgccagtcagcgcggtatgcatcccacgatccatcggtatcaagcttggccatggtcttcaaggagtcaacagcgaccgtgcatccaactgcatgggcggtgtaactgtggccgtggagaagggcatcgctcttttcgggactcgagaaagcattgaagatttcctcgctagcgacagtcgtgcagagtggtaccagcccgcccgtgaggagtttggcgttgacggccacgtcggggtgcactcctaagaaagaggcggatgtccgccgaccgagacggtacaatccggtgaagacttcgtcgaagatgactggcaggccggaccacgacggggattgtttgggtgcggtagcgttgggggaaaacagctctgggtggtcgcggaccacatcggtcaggcatctctggaagagagggtcactaagggaatcgttagttcatgtaaatgaaggatcgtagtggattcttaccagaaaagcattccacccgcaccgaggatgaccggttccaagatcaatgctccaaacttcactccttggcgctgaacgagatcttcaatagtgcgacggatgtagtccttgtaccgctgggcagtggcagactcaagacgctggctgaggtcaaacaccgatcccaaggaagcgaaatcaacatcctcgccgagttctccctgcagctcaccggggatctcgactttccaagatccgccaaccatcttgacaagaggaaaatcgaaccagtggccacgaccacgataccactcaaccttcttattgaatgtcgaaggttccgaacagtccatcacaccgatagtatcaccgtggtagctacccttgagtccaagaataccaacctgctcctgggaggcatcccaaccgtaccggtcgcaagaagcgcgtagacccatcttcacagcaacttccatccctgtacttccattgtccgtgtagaagactttagtaaacctcgggttttcgatggttttcagtagattatccgcaagcgtcagcgctggctcatggacagctcctgcgaacatgacatgtccgtaccgaccggcggcataggcagcagatagtgctagttcggggttaccgtggcctaagccttgagtccaccaggacgcggatccgtcgaatgtcgggcgcagttcaccctctgcatctttggatgtgttggagccgaatgtttggaagtagtcatcatgcgctgagtcgatgacggtaatgtccttggccttcatgccttggtgctgggtaaaggggtaccatatcagctcttgcgcacggtcggccatctcttcgagacgctggacgcgctcggtattattgacggacatttcttcaagcaatcggagaacctccgactcctttgcggagttttggtagtagctgaacatggcctcctcgtcccttatttgggagtcggcatccagccgcgacggtctggctggaggcgctggtagcgacaccaagggaatgctctttttctggaagtattcccggaggtattcatgattttgatagtactcatctcggaacacgagaaccgatgagatatcatagccacggagaagcaacgactcgtaggcagaaatcgaagaagagataccccctagacgagagtctgccaccaacacgattggcatccgaagtggtcgatacaagtcagcctgtgagttgccattggggcccggggagtgcacgcccccggccgtctcaacaagggcgaagtcaatgtcggaccgcgcccagccggacagtgtgttgtgtatggatgcgagaaggtcatcgtctcgcggaacctgcgcgatgagctttaagtcttttaattaggacaatcgcacttacaaatttatcctttgctgccaagtgcgggctcacgggatcgtcgaattggtagagacatttggtgagcgtcccggcgccataacgccgcaagtgcctgcgaccgtcagtgaccggaattaattcaatcgaattgcttcaaagttcgcctaccgatcatcggcatcatctaatgcccccgtagaaaccggcttgaggaatgcggcgcgctgtttctggtgttgaaccgcattacacagcaccgtggagataattgtcttccccacgtccgtgttagcgccgtagacttggtgggctcgtaaactgcgccagagcgctgcgccgaccggaggcatgacgagatgaatgaagtgagtcacgatgaagtccaagagacctcggcgggtcaactgccattgagtttccgactccacgcaaatccccacaattttgcatttcaccggattgtcctgttgggtttctcaacgacttgggatcttggctttgggaattgaattggttctcttgccaatctcaacaatcaacaatattcgaatcggaaatcaagtggatagccgttgacaggaacagtacaggaacagcacaagaacagaacaggaacaggaacaaaagaatcgacgtgatcatgaaagccgatatgactcctccggggacatcgaggacagcagggacagcagggaaaacatcgcacaaaacactcgttgactcactatccgccactttgtcgcgccgggaagccaaatccgcccgtcggaggctgaccattttaccccggacagctgtggatttctcctccaatgacttcctgtcactgtcaacttcctctgcataccgagaacgctttctggcactgttgaacaacacgccgccatcattccctcttgccagcgggggatctcggctattagacgggaattcggcttacgcggaagagctcgagaacttcctcgcgacattccatcgagccccgacagcacttctattcaactccggctacgacgccaacgtcggcgtactatccagcatcccccaaccaggcgatgtgattttgtacgatgagttcattcacgccagtgcccatgagggcatgcgtctgtcgcgggccggtcctcgggagatgtttgcccacagttcgccggttggcttgagagaggctctgcagtcgcaaatagatgaagacccagctattgcggaaggcgcgcgcaatgtcttcgtgctcattgagtccatctacagcatggatggcgatgttgcgcccatcaaggagtttatcgcggttgttgatgagctgctacctcaaggcaatggatatttctacgtcgatgaagcgcatgcgactggtgtgtttggaccgcggggtgcgggcgtggttcaggaactcggcgttcaggatcgcatgttcatccgagtgcacacattcggcaaggcactagcgagtcatggaggtatgtatgatctgttttgatcgcccgttgaaataccgaactgaccatatccagccgtggttctctgtggaccagagacaagggattacctgatcaactatgcgcggagtttgatctataccaccgctctaggattcccattcctggcatcgattcgcgcagcctatgagatcctagcatctggtgaaaccgaatcagtaagttgatcatttctccatactcctaatacccagctaactggttcacagttacaacgccggcttcaggagttgatcggtcatctccgacaacgactggcgggcctccatacatatcaatcagtcatgttcgaagtcgaccatttccccacatctcccattatctcccttcgcacatcccagccgcgacagctggcgagtctctgccaggaaaacggattcattgttcgcgcgatcatgccaccgacgattcccgagggaaaggaacgggtgcgagtgtgtttgcatgcaggaaacaccgaggcggaaatcgatggtttgacgcggatgattcagtcgtggctcgatcaaagtcacagaaatgtatcaaaattataaaagtatgaggtagttgatttgcatctgggattttctactagtaatctctattcaaggccattcatttaaattgttatctcataggtcgttatccggttacttgaatgcttatatgcaaacaaacaagacgatgtttcatgtccttacaatatcagctggcaaacttcaaccaccccgtcctgctgattatggcccataatccaaaatccagcccgatcacgttgtcctgcttcgggtatcaaaatacgcggccagcccttagcccgacggtccgaggttgccacctggtcttggtacctattgcccagcctcggcaccagggatggatgtcggcgttatatgtggaatggatccgggattcgggccgtgatgcccacttattcttcgtgccaaatacctccgcaccgagactatcagtgcggagtatcgccgaccattaccgagggtgtttaaatgggataccgacgcggaaatcaactttgagatgattcggagctagtactccgtagatcaaatcaaagtacactgttgtgtaatgcctgaagtagtgtgtaaggccactatgtgcgaacttcactaattcgatctcttggccgatgaagaaagtccgtagaatttgagattttacagggcaattgttgtagaatgcatctatttctattgatttaaatcctctgtacttgaaattacttgttcattagatatctagaccatagattgctccaccttcatactagcctgggtatccgagcggtccatagtggtataccgactgaaatctctcagatcccgacggtcatcaccaggcgaaacaccattcgccactgccttgcggtcctgacgacggaagtaaacacgcttgcaccacttccagctctcaatacccaagaagaaaagcaccgtctcaacaaacacaataccccactcccaagaaatgctggtatgcttgaaaacactgtgattgataacaggaatgtagatgatagggaatgcaagaacgaagccagtcatgatgccgaagaagaggaacttgttgcgccagatatcatgcatccactgggtgtagcgtttcttagagtcgggctgcatgtggaagaagctgcggcgcagatgcatcatctcccaggcgaggaagagggcgaaccaggtcatgcaggtgaaggtagtggcgcgggcgcggaaaaccgtgtcgcagtcgtagggtttgttggggtcgttgtagtgtgtgttacagccctgagcgagctcgccgttgccccatcggaacatgacgagggagaatgcggacagacagagggcggccatccagactccgtagacgagggtgtcgacgatgatttcccaggtgaagataccttgtttctgtgatttgttagtaaattgaattgttagggtaaggcttggaggaacttacactttgcggtggtcggtccatcacttccggggcggcaatctccattcccagacccatatcagggagaccagatgtaatcatgataatccagatgatctcgacgggggagatagggaagacagactggttggtttcatccttgaaggccaatccaataagaagggtcaatgctaaagcaacgttctccgcaagaagatgtagaacgaatttctggatgttatcgaaaatgcgacgaccttcctcaataccgttgatgatagaagcaaagttatcatcggacagcactagctcggaagcatccttggccacatctgagccattctgacccatggcaatgccgacatcagcccgcttgagcgagggagaatcgttaactccatcaccagtcatagccacaaagcgcccacgacgatgcagggcatcaatcatacggactttcgtattaggggcacagcgagcaataaccaacggaagggtgggaagttgatcaatctcatcttcggtcaatttgtcaaactgggaagccgtcataaccatagcatcggcaacgtccttcgcgatcatatccatgttcgcaggaatgatcccgacttgggctgcaatcgcacgcgcagtaccggggtggtcaccggtgaccatgtgcacggagattccagccttgtagcaaagggcaatagcaccagctgtctccggacgaggaggatcgtagagaccgatcaaaccgtagaaagacaaatccttctcgacgtcctcgcggggaagagggctgtcgccttcttttgcaggattggtgttctcgcggccggccatagccagcacgcgaagaccctctttagccaaagcctccatgttctccaagatttcatcgcgtatttcatcgttgataggaacgggctccgagtcaggcttccatttgatagtggtgcatgcctcgagcactcgctcgacagcacccttggtgaagatcatttcgcgactcttccctgagttattgtcgtcgcgctttgtgaaaataacagacattttcttcacggttgagtcgaatgggtactcggcctgttgctgccagatcggcttatcgcccttggtccagcgagacagaccccagttgaatcgagaggcgaaaacctggatggcaatgtcggtgggttcgccgcgagcctgccatccctcggtggcactttggtgaagatgggccaggttggccatggcagtgacgttgaggaagtccttgagcgtatcgttatcttttaacaagtcatctggcgatgcaacatcgcccaatttttcctcgcctagtttgaccgggggctctgcaatcaagctcagctcgccgtcttcggggttgagaggttcattcgaggcaccgacggagtaagttcctagggatgggagccaagccctctttgcgaccatgcggccttgggtcagagtaccagtcttgtccgagcagatgttggtaacagcaccgagcgcctccaaggaatccagcttccggacaataacatggcgctggaccatctgcttcgttccgacggccatagtaattgtcaacacgaccaccaaacacgccggaatcatagctagaccagtcgcgaccgcataaatgataacctcgctatcaccgcgccagtcattcgacgcagcaaccacaatcgcaaaaataacagcaatggcaaagagcagaagcgccagcttggacagtttccgctgcaaaggtgtaccaacattggtacccaagaaccggccaatggcatcagtggtcgtcaatgtccaagcctggatataccatcgcttcttcgtttcgccttcaggtccacgcttaacagggcgacgtttcgggtcggtaccacggagggcttgcgcgatagctccaatctcggttctcattccagttcccacgacgacaccgcgagcacgtcctcgggtcacggttgacgaactgtaggctatgttcagtctgtcgcctgggcctgtgtcgacctcaaaggtggcctctgcatctttttggactgggagggactcgccagttagcagcgcttcgtcagtttcgaaattgaatgcttcaacgagtctatgaagggttagcttggtattctgatattctatacgggttggtacatacctgacatcagcagggacagtatctcctactttcaattcgaccatgtcaccggggacgatctcatttgctgggacggttgccgtcttgccgtcgcgagaaactacacctgtgggcgaactgagcgatcgcagcgaatccatggtcttctcagcggcgtaatcctgatagacaccgacgacgatgttcagcccgatgacggcggcgatgaaacctccttcgatccaggactggatgccgaaactgacagccattgcgatgatgaggacctagaaattcttagcaatcattctatgatggatcttggcttctgacttaccagcatcatggcgttggcgatctgtcgaatgacaatcttcgccaaggagacgcctttgtctccttgaagcatattctcgccatacttctcgaggcgttgcttgacctccgcagttgttagaccatcgtccgaattggtctggagttcgctgatgacatcttcgaaggtgagactatgggcgggttgggagagaggttgttgtgtaatgtcaacatggctctcggagccggagcctttgtgcgacatttcgcaatatcggatggtagagtgttgtctctagttgggtgggttgagtgaattgagtgaattggtgaaagatgtacttctatgaggctcttaagggggcaacttatagaaggtatctgtaggagaatgagagtccatacaccgggattacttgagtaataggcacacttctatgaaacaaccttcttttcttttcttccgaggggggttctcaaagtataaataggatcagaataccactcgatggcgaaatgcaatcggcagttatgaccggatgtaatctgaaggaaattgtgtccgacatccggggaactagattttatgctggcgaatcaacttcatttaccacatctctgtatcaagcggacgaccttggcgcatcatcgatgacgcaaacggagtctaggcatgtccgggtgggtccccacacgacaattctcgggctctgattggtgcggaaattgcttggcataaccttggctggacaggtcgtcggtttctatctctctggcttatttcccacctctggtcttcttggctcttggcacttagaacctcttggcatttcggggctcgagggttcctccgcttcaaatccgcctctttctccggaggaattcttcaattcttacgtggcgaaacccccattatctttgtttttcgcctcagataatgggctatcaattgctcctggagacacggtgcctgaatacatgattgacccgagtgatccgatctaggttgcactgtcttacattgcgctattcctccattctcattgggtctactatcgggcgatactccaattctttatttttattttcttctcgtatcttcttcgcttgggcctaaaacccatatgaccctccactcatggcggacgattctatgccgcgagaggagatactcggggttgtgattggggcagttgcgctgttttccctgatcagcatgattccggtgtaagtacggaggcgcgagaagtcttggcaacccccgcgcttcatgcatgcgaattgttctcgaacttccgaagtgccgatcactgatttgtatgattttccgtctagcatgatcatgagacatcaccgacgacgcgccgccatacgggccatggccgcagcccgagttctcccaccggtatatcaggtacagttgcagaatgtgttgggccaacctgtgtccgtggaccgatggttggaagaacagaacgtgcctgccaatgcgcaacaatatggccaagatacttggtaagtgcgctattccagcattccaccggtctccgattccggctgcccctcctcgagccttttggccccgcggctggatgatgtcgtgtggggacactagggctgggcattcggtccctccgccctatcgggatccgcgagttttcgtggaggcggatccatggtttctgggcaaggcgttattgcgcccaaggccaatttccggtgttcctggataaacacgcgtggtcttggctagagatagcagaccgtgcaagcgactctggacacatcgactgaatcttctagaatcaagctaactcacccagccccatctgtctgtcagcactatcgtcgtccccatacctcgcctgtcccgatccagccgtgctggctgacgaccagcataatcccaacccgactacacgaccagacccccgctgcagctgcggggcacattccccgcccgatagcgaggtcctcgtactcaatcgctgcaagcatgccttccatctagactgtctgaagtcctggtttgaataccgtcggtataagtgtccgatctgccaagcttcgtattcgccagaggaggaggcacgaggatgatttccagaaataattattgacctgcatgcatgatcctgcggggttgcccaagtgcaacttgcatttggtcagcgatatgccctttgactatcggatcaatacggcttctttcttatatttttctcctttttctttacctcttttgtcttgctttgcttttgagatatccgtcaacgtgacacgacatgtttgttcattccgttctttgatctgcatttatccattgaccatctgtccaaagaggccgcagatgatcttgttttatgtatctatacgcagtcatatatactcgttatgatcgtgatgaaataggctatgtatattgaccgaatggacaccttcctagcctgttttcacagaaatgtatacattaaatcaccatcattgtactctcatcttctcatcgtccgcgattgaacaaccgggcacccaaataggaaatttatctcggcactccgcatttcccgtctctacggagacagcttctaagatattcctttttttaatttccctccacgatacaagaactccatgcataccaaggagtagcatcagaccctcctatcacacacatctcatcaaaaatcaatcaaatccctccaccatgggcttaaatgccaaagaaaccaagctcgtcgatatcgccagagataccatcaacgcaatcccaaggtcaagtacccacagtgtctccagcgcagccctctcaatcagcggccaggttttcaccgccgtgaacgtgttccacttcacgggcggaccatgtgccgagctggtagtcctcggtgtagccgccggagccgggactccgcgcctctcgcatattgtcgctgttggcgaagacggccacgacggaatcatcctcaatccctgtggtcggtgtcgacaggtgctgtatgatttgcatcctggaattcgggttattgtgcagaagggcgggaaggcggaatctgtccttattgatgagttgctgccttatgcttatgagcctagggagtgagatacgatacaattatgtgcataatggagatgccgaagtaaccggtgtggaatatactacggagtggcagtcaagccgatctaaaaatacatttcgacgaactaggctccatagttcactaatagcctgattcaatccaatcagcatagtcgcttcctagaaccgtgtcctttgtgactgccgccgatataggagtctcgtactcgcgcgcagaagtatctgacccggccccgctattgttgtactcataatacagtggtgtagcgccttccgctaatgtcgtccagcccttggcattgactatactacccaggttggagttctggtagatgacgcgagcaaggcctcgccatggacggccaagatagacagtgctatcgaggacagcactagacgcagccttgatattgcagcggtcgagtgcataccaggtggtgtcggtagttgtctggcgcgaactggcagtgatggcaccagggccgttggagactatatcgcagttgttgaaccaggcggaggcggcgccgaagatgtagtccacggctcctagaaaccgttagtacttatagtgaaatagggatgtgatagagaatgacttaccctcgatcctgctgttggcgtagtattgtgttcccgacttggcgtacaaagtatcctggtatccactgaactgacacgcatagaagccgagtttatcggcattggcgacgagtctggtatagtcagtcaataattcaataccaaggcaaagaaatagatactcacgcaacagcctgcgcgcctttcccgtacccgttcaccacattaatattgtgcatcttgaacccatcggcgacaacgttcacggtagcactcgcatccagtgagccagcctcgggcgaagatatcgtatgcgtaatggtaacagtgtctcccttatatgactcctcatacgtcgtctcgccatacaaagtcagagcaccggcatagttaatagtaagctgttcctcgtacgtgccgcttgcgacatagatacaagctgctgctgaggaagagccgagagcagtaagtgcagcgccgatagtcgagtatttcccactcgatccgactgtcaggcaacctgcgggggcagtggtcctagctgtgcgggtgactagtttggcgggtgcgcccaggaccgccgtgctgagggctgcgaggaggaaagcgtgtagttgcattgagagaaattggtgttttaccggagagaagggaatggtttcgggttatgtactccgtccgtctttatagaagttgtttctccaccgggactttgtatagttatgggacatatttttccgagataaagagagatttcctcttcaaggggccaatatattcaattatatccacagtccaattcctatttgtttcacggagttccaccccgttgcgtagaagtggatattcagggcagatcgtagatcggggagaacaacgtgggaaagtcaccggaggataacccattgggtaattaaagggaatttatggaccctatatctgtttgagggtgaagaaatgactttccctcatggaattattcctcgaatggcgggccagggctaaagaagaggtgtttcaggtggttttatttctccgttgacgaaacattgaaactatccacatgcgaaacacttaataagagattagagaaggtaaaaggagaagagaagttatgaaaggtataaaactagaaacgcagttattccaatcatagctgcgataccataccttcaatcaccacgcaatgtcgataacaaaagccctcgcagtctttgcgcttctcggctcatctctcgccctaccagacaaagcaagacaccaccatgctcgcgcttcatcttgcacaccagtagcaggtggatcttcctcaatcgacgatgttcccgctataacatcagccatcgcctcgtgcggcaagggaggcactatagtcatcccatctggcacaacctacaacctgaagagcacactggactttgcggggtgtgttgactgtgacttccagttggaaggtaccttgaaattcagctcgtcaacatctacctggaagggacagacagcaatgatcaatatcaagaacattgacggacttagattccgatctgtaacaggcagcggagtcatcgacggaaatgggcaagatgcgtacgcattcctttcctttttctttctttttaattctcatcccagtccactaatatcacatgtagatgggacctcttcgcaacagacagcacctacgcccgcccaaccctcctctacatcaccggcggctccaacatcgaggtctcaaacctccgccaaaaaaacccacccaacgtcttcaactccgtcaagggaaacaccaagacggcgaaattcctcaatctaaaaatggacgccacatccaagagcgacaatgagccgaagaacacagacggcttcgacatcggcgccagcacagacgtgaccatcagcaacgtgaacgtgaagaacgacgacgactgcgtggcattcaagcccggtgcagacggcgtcacagtcacggacattacctgcaccggaagccatggactgtcggtggggtcgctggggaagagtgccgaggacgtcgtgaagaatgtgtacgtgtccggcgccacgatggttaattcgaccaaggccgcgggcattaagacgtatcctactggtaatggtcatgccatgtccacagtgagcaatgttacttttactggtgttgtggttgatgggtgtgactatgcgattcagattcagagttgttatggagaggatggtgattactgtgtgctgaatcctggggatgcggacctgacgggtgttgtttttgataagttcagtgggaagacgagtgggaagtataaggctgtcacgggcaatcttgattgtggatctcttggtacttgtgatgtcaaggttagtgcttatactgttgaggcaccatctggggggagtgaggttttgtgcgctaataccccgtcgactttgggggtaacttgcacggctggtgcctcgggctgagaataaggagatcagacctatgtatagttgagtgaagaaactgaaaagaaagttctatacaattttgcggtatataaaatgtgttcgtcatacatgtgtgatttctagcgcagtacaccagaaatcccgttctaatacttatgaggatgcaatcatcttgtccttcacgtaaaggtcgacatactggtcgacgtcgtagttctccagctgggagcggtcccagcccagcttcagcagctcatcaacacgagccttgtcaaagtgcgcctcgatgtgacgcttgtacttggccagaatctcgggcttggcctcctcgcggcggagacggtggcccagaggagcctcgacaacaacctcctcgaggacagtgccgtcgttcaaggtgacggtcagcgcgttggggatggtgcgcttggtggggtcgtggtagtcggtggtgaacttggggtcctccacacagcggatcttcttgcggagagactctagcagaggggaggtcgcggcctcggagccgtcagcgtagtcgcttgcggtcaggcggccgaagacgagcatggtggcaaccatgtactgcacacagtggtcgcggtcggcgaagttgtccatctccttgaactgcttgtcaatgatgcgaatgcatgcctcgtgtgtgcggttggtgatctccttgatgtccttggcgctcttgcccatggaggcaagcttggcattgaccttttcagcggcctcgatggcagtctgagagtggaactcggcttgaaggagttagttgttgtcaattttgtatagtgtcatttctgcaaatttaaacttaccagggtaggaaaccttgaacagaacgttctccatgacgtaactgccgtaggggcgctggaactggaacttcttgcccttgaacaggacatcgtagaagccccaggtaggagcagtgagaacggtgcggagaccaccctcacccctctggaccttgagaaccaggttgacagcgcgctggcaggcgtcaccggcagcccatgacttacgcgacatggtgttgggcgagtgacggtaggtacggagagactggccgtcaacccaagcctgggtaatagcatcggcagtctgcttctcggtaagacccaacatcttggagacgacggcggcggtcgcaaccttgacgaggacaacgtggtcgaggccgaccttgttgaaggagttctccagagccaggacaccctggatctcgtgggccttgatcatggcctccaaaacatcatggatcttcaggatcttgccgttgcctaggtttccgccggcgcggttggtgcgggagatccagtcggccacagccaagataccaccgaggttgtctgaggggtgaccccactcggcagcaagccagcagtcattgtagtcgagccagcggatcatagcaccgatgttgaaagcgccattgacggggtccagctggtaaggagtgcccagcacacgggtaccattggggacaacagtaccctccacaacggggccaaggagctttgtgcactccttgaacttcagagcctccaatccacagccaagggtgtctaggaacaccagacgagcagtgtcaaactaaaaatttagaattagtcggtgcttaatctaaccgggccgggtaaacttactgccaagtcggaatccaccttatagtcgtggatgtaactggccatgtcctgaatttcagtgtcataggacttgtcggtgtgcaccgccggggcggcagattgacgagcagccattgtagagaaacggggagtgcgaggcaccgagatacgtggagagatggagagggaagaagtcaaagtgggaaatctggagatgcgggccaaagtgcggggagacgtgtgggtcaggcgtctcactgcgggcaaggacatagtgaagaagggtttggaataggattgttgatcaacaattgacacaattggagagacgaagagggggagatggtcagttatttaaaacaaatcatggacgaaaggagaaatgttggggaaaaaagggagagaaaggccggggatgtgttccaagctgacttcatactgccgagggtcggttacagtcgggtattacttctctctaccctttgtacaggcctttgtatgccttcttactctttgtttatggggttgactaccttgtctacagacggtagactgataattgcactattactttttcaataggccgagttgattgctatgttaccgtcgtttgagcttcctggccaaaatccgaggatcggacataaaaggacagcaacagaccaggatgcaagatgtagcgaacatcggaatatacggtccgaatgtgcaaggaaaggacaagccaaaggagcaaaaatgttgttcgaaggagctcaccccgagctcatctggaccgctgccctcggctgatctgcgagctcacgtgcagatcatcaccccagggggccttccccaatccccaatccccaatccccaattccccaccttttctcttttcctcctttctgtcgtcaccatcactctaggatatcagtggaatattcccatggcctcttctgtatcagttttatacagagacttgacaatctctccatagatagctttggcaaagagcgggggcacggcattcccaatctgcttgcgcatgaatctcccagcgaactggaagtccaggggaaatgtctgcaacagggccatctcacgactggtatagggccgggtacccgaggggtggtagttgtattcgccacctccgcaagtaattgtcctggctagagaatggcgatcaaaaaacggtcggtggctcaaagcccaacgcgccagtgccgcttcaacgttgtggtcttcggcatcgggaggaatgttgtcaatcgtggatgaaatggtctcacgcggacgtaaaccgtgaccaggcatgccgtgagtgggttgcgcataatgtggtagagcttcaccgggtctatgaacacgtggttagatatataaaattggagtatgaaaagcatcgtctttcacttaacttaccccgcagcaataagaagcagtctcttccgctcctgaggcactccatattcatcacagcccagcaccgaccagcgaacggaatatccaaactcaaccatgtccaggacaactcgattgaagataacggggaatcgttgcggtaaccccatggtttcctccatggtcaacacccggggacgggactcccgaatcagacttccagccgaaaatacgcacgccgagttagcgtcatcacgaggacagggcacagtatgagcaggggaccaggtttggcacggaggcgagcagtgtgcaatatccactcgcaggaatttcggatcgttggtaagaaaactgaaaaagtcggaatgctcgacctctacatcgtcaaaattcagctgatatgtttctagtgcatgcttatcgatatccacggcccattgtagcttgacgccggcctgcttagccccgcaagacacaccaccagcaccgcagtatgcgtcaccaaaggtgtatgcacgatcagggacagtcaaatcaatcacaccctggcgttcaagatccctagccatggaagacaccctagcctcgccgaaaggcacagtgtggcctctccattctgcacgcagctggttcgcgcgctttccaagtcctggatctgattcggcaaaggtcagccattcaatggcacactgctctgcacttaaaggtgcattaccaggaataatgacgactccattctggcgaatggtgagcttcagtcgacaagtcagttcatctcccggtgtgaggttattgaagtcagtccgatagttggtgaagcgaatggacacaacccgcctaactttcttgatgctgataagatcggtcttctgagtgagccagaccaattcattgttaagttttggcaaatatgtcttggcttcggggtgcgtggtgcggtagagatgccgtccgaaaaaaagcagatcatgaggctgagggatcatgtccttgacacgcaggaaagagccgtcttcaagctccagagatattccgggtttgaacacaacacccccaatatctatttcttgctgcattgtctccggtgttgggctgcagctggcggactggttgctgatgagagatgagttgccagaagaagaccggtcactcgctaagtcgtcgccggcgacaatgacggaggcagccccaacgtgtgtcatttcagaggtcaattcctcaatggcttgattggtctcatcatcgcaggtgaggtcaatgacgatctgcaatttctcggtgggctggaaggtgtgactggcctcctgcatgggtggagtggtatagatcgccgacggatccaacatgatgatatcttcgtcgagcattgtccgttcatgactgactgctcggaattctgcagtgctcacagggactgggtctccaaagggagacactgaaatacgggatcgatcattgatatcagccatcgatgtgatggttgactgatgaaaatgttccatattcggctcggatgatgctaaatccggaatcttaatgaatgcgaagaagatgaagttcgatttaaaccgatgaatgatcttagagatcttcttgtaaggtctttccggtatggtctcacgttcggatgagttggccttcagaaacacttctatttctatagccggttcagacctaacccgcgcaagtgatcacaactgatttgaaggaatcgcagggtttgccaggccttctatacataacaagtccaactgaagcaacgcaaatttgtctttgtatttctatttggtctacaaagcagagatgatatctagctctgtgcagcatgaaagactggcatagagccatggtattcattttatctcattgaaggtccgcatagctgttccaatctggtttgtatactcatctatggttgtatgtcaatatcaactctatagacgcttagcccgttccggatagtagggcatgcccggggaatgcccgggcacgtgcccataggccattgcttactcatatccccccgaagtcggcccggacgaccacgggagggaagagaaaatttctgtgggcaccgaagaaccacaaccgcaatggaatattttcctccctctctctctctctcttcttggggtggtgttcattttcagtgatcaccattctcttatcttcactccttcttttacgtgatctggtttaggtaagtcgcatgatttcattgttttcagctactttatgcaaagctgcccctctgtctcttgtgatgaattatggtattttatagatgttagacttcctaaacaattgttgcggataaacacctggactgatttgagacacttcaatcttgctatactgtgaatgcgatgtgaacactggtactaattgtcttcgtccattgcagaaaacctactcttcgtcaggatgtgtggtatcattgcgctgatccaggcgaacccctcgtctgcggccgccgtggatctccacgaggcactttaccttctccaacgtgagttccggccagaatatatatacctgcgaccgcgagactaaaggttctggtatcacagatcgtggtcaggatgcagccggtattgcgacatgcgcatccggcggccggatctaccaactcaaggccaacggcatggctgccaaggtcttccaggaaggtgctaaggtttccaacctccccggttccatgggaattggccacctgcgctatccgaccgcaggatccagtgccaacgccgaggcccagccgttctacgtgaacagcccctacggtatctgctttgcgcacaacggtaacctcatcaatgccggagacctccggaagcaccttgaccttgaagcccaccgtcacatcaacaccgacagtgacagcgagctgatgctcaacgtcttcgccgatgagctcagcgagaccaagaaggcccgtgtcaaccacgaggacgtctttgccagcttgagtcgcatgtacaagcgttgcgagggtgggtgggcctgcactgctatgcttgctggtaagttgtgaatcactcctgctgttttctagtctatggccctaactcgcgactaggctttggtatcttgggtttccgtgactcctacggtatccgccccctcattctgggctctcgtcagtccgcggatggacccggcatggactacatgatggcttctgaatcagtggctctggatcaactaggtttctccgaccaccgtgacattaagcccggtgaggcggtcatcatcgccaagggtggtgagccggtcttccgccaggtggctccccagaaggcctatgccccggatattttcgagtatgtctacttcgctcgccccgactccgtcatggacggtatcagtgtgtaccgtagccggcaacgcatgggtgaccgtctcggtgcacggatcctcgaagtcttgggtcccgacgttgtcaaggacattgacgtggtcattcccattcctgaaacggcgactacgtccgcgaccaacgtcgcccaatatcttaacaagccttactgccagggtttcgtcaagaaccgttacgtgttccgcacttttatcatgccggagcagaagacacggcaacgtggtgtccgccgcaagctcaatgccatgaaggctgagttcaagggccgcaacgtcctgttggttgatgacagtattgtgcgtggtactactagtcgcgaaattgtcaacatggcccgggaagccggcgccaagaaggtttaccttgccagctgcgcaccggagatcacacatgctcacatctacggtatcgatctggcctctcctcaggagttggttgcgcacaatcgggactccgcggctatcgccaagcatattggcgcggaagcggttgtcttccaaactctacctgatctgaaggatgcctgtgcttcggttgcccgtgagaatggtcaggaggagcccacaaactttgaggtcggtgtcttcagcggtagctacattacccctgtttcttccggttacttcgagcatctggaggccgtccgtggcgaaggccgcaaggtcaaggctgttgacaaggccaaggaggctgtcaccaatggctgtgccaacatgaccgacttccagattgccgcgcatggagtcactatggacaccaatggcaagatcatccctgccattgacaacgagtcggccattggtgccggcacgcagaccagcaactccgaagaccagcagaaccctaaggtctcggaccgcatggacatcagcatccacaaccaggctgaccatgaggcatgaggcattattacgagacatctgatttccattttttttaaatttctttttctctaccgttctggtaacttgcattgggtatttgggcgtttatttgagggagcatgtttgctgagtggctgatttgctactgtatgatatggaaatgatgctcaaagcattgaaaataccaagacccgatgtcttgagatacacttgtcaataactcttgatgaaacaaaaataaatgcaatattcaatgttgttgaaatgctgttctttcatcgttggctgtcccaaagaggcaggtcacgtgcccgtcgttggccagtagcattccctccgcatcatcgacagacccacgatgcgctcatcggcatgaatcaagcttagccctctgttcggttgaaatgaattgatacgtcttgttatatcgggactcgtatacgttgcttcacttgcaagattgaacgaaattgacgctccttctctatataatggaacgccgcattactcgttctgcagcccgggctgccactgcatggagtgcgggagaaaacagcccgtctgtcactcaaccaccaaacactactaaagggaacaaacgaaagcgtcgaacccccaataaattgaatacacccataattcaaacagtcactgaggtcaaatcctccaatgattccgatcctgcagttaaacaagaaaaaccagtgttgcctcctttgttcgatgagctccctcataacctagggccaatgccggcccctttgtctgtagcaacacagcccacagcttcaattactggatctgacaaggaaaaccaaactttagagggcaaccaaattggcaatccgtctactgagttccaagacactgtgaacaaagctacaaccaagttgaagaaagaacccaaggttcaaactacccaaagcggccgcaagccaaagaaaaatacttatggcttgacgcccggtatctctcctttccccgaattggttcggcccactgccgaggagtgcgaagatgtcaatcggctgttgtccagtatccatggcgtagtcactgctccagcaaccattcccgagccatccctgacagtcaccgggtgtggtgaagtcccatccgttctggacgctttaatcagaactcttctcagcggtgccaccacgggcaacaacgccgccaaggcctttggtgggcttgtgcaacgatttggcattctttcagaaggcatcggcaagggaagcgtgaattgggatgctgtacggcaggccacagtgaaagacgtgtttgaagcaatcaaaagtggcggattggccgacatcaaaagcaagaacctcaaggcaattcttgacatagtccacgaagacaaccaggcgcgccgagccacattgttagattctgagtccaagaatgactcaatgtccaacctggcgcctgaaaaggctgaaaaggacaagcaatacgagattgcctgcgcagatcagaactttctctctctcaaccacctccacaatctcaccagtgaagaagccatgaccgatctgatcaaataccctggaatcggacccaagacagccgcctgcgtgatcctgttctgcctccagcggccctgtttcgctgtcgacacgcacatcttccgactctgtcgctggctcgggtggatccccgcccgtgcaaacgaagtaaccgccttcagtcacctggaagtgcgcatccccgaccatttgaagtactcgctccaccagctgttcatccggcatgggaagatctgcccccggtgccgagctgctaccggccagtccagtgctggctgggtggatggatgtgtcattgatcaccttttaactcgcgacggcaagcgcaagagcaatggtccgactatggtttctaaaaagaaggctcctgctacgagcgcggttggtaagcgcaagagaatgagcaaggactccgaggaggagactgaggaaagcctgagttcgctttccgacggaacaagtgacgagtgaatgcattatgacaacgaaattatgtgaagtcaaggtggaatctttacgaggattgatcgtatcaatctatgacgacgaatggcttaagccgaatatttactctatatgattatatatttaccatattgctataggtctcaattcaagtgtgttattattgctaaacacaaagatcaattccataaatcaagtctgatatttcctagatgatcgctggtctacctatgttgtcgtatagcacaagtaccccttatcgccttatcgtaaacacgaaaagtcaccagaaactccctttactcccaacaacactttccagttgtccaattgcaccaattcccgccatgggctgtctggcatcccacattccgccctcgctgcgcactcttctggaggcctacgcgcctcccgggtcggtagagtacgccccgcacgtcggagtcgcgttgacctcccttctcgccgtgtacgtggggtacctctacatccaaagcttgagagaggcagcggtcgttttcaatgttcctatcccgtccgaaattcgcaatagcaggtcaatcaagacatgggatgaggttcaggggtggcagaaaatagtgttggaggatcaagctcagggagtgagttaatatgcctggtctttcgcttgggatcctttccttgcggtttctttttcttgttcctgcgctaattgcccttccactatacagaaatggaacaatgaattgattgtgagctactgtcctgccgatgggagggtgctcggtaacggaatcaagcccgccacggttgaagatgtcaacgaagttgttcgggttgcgggagctgctcaaccggagtgggcaaagactacctttgcggagcgcagaaaggttctccggacattgctgaagtatgtggattggcatatttgctccgccctatgaaactattgcgctttttctacgtcacccggcgaagcttccaactaacacctcgcagatatgtcctagaccaccaagaagacctcgttaccgcatgctgtctcgattcgggtaaaacaaaagttgacggctcattcggcgagatccttgtgacagtggagaagctcaagtggacaatcgatcatggcgagaaggcactgctgccagagcgccgaccgaccaacttcctgatgatgtacaagaagaacacggtcacatacgaaccgctgggcgtggtgggtgcctgtgtatcctggaactacccgttacataacttcattggaccgatcatcagcgcgctgttcaccggcaacgcagtggttgtcaagccgtctgagcagactgcatggtccgcagtctacttcctcgagatggtgcgcggcgcgctctctagctgtggccactcgcgcgatctggtccagacgctagtctgtctacctaatgttgccgatgcattcacctcgcaccctgatatcgcgcatataaccttcattggatcccggcccgttgcccaccacgtctgcacatcagcagccaagtcactcatccccgtttgtgtcgagctgggcggaaaagaccccgccgtgatcctggacgactcccgcactctccgcaatctcccttccatcgcatctatcctcatgcgcggtgtcttccaatcatccggccagaactgcatcggcgtcgagcgtatcatcgccctccccaacgcatacgaccgactcatcgaaatcgtaaccccacgcattcaaaatctccacctcggctctgtcctcctcgacaccgcaaccccagacgtcggtgcgatgatctcgccagtatcattcgccaacctcgagaaactcatcaacgaagccgtgcaacaaggcgcacgtctcctcgccggcggcaccgaacacaaacacccagtccaccaacacggccactacttcacaccaaccctgctagtagacgtgacacgcgacatgcggatcgcacaaacagagctcttcgccccagtcttcctaatgatgcgcgccgagtccgttcctgacgcaatcgccatcgcaaactcaacgccatacgcactaggcgcgagcgtcttcgggcaccaacaatcggacgtgcaagcctgcgtgtcaagaatctccgccggcatggtagccatcaacgacttcggtgccttttacgccgtgcagttgccgtttggcggcgtgcgcgggtccggatatggccggttcgcgggcgaggagggactccgtggtctgtgcaatatcaaggctgtttgcgttgaccggtttcctacgttgattggcactgggatcccgccacgcgtggactatcctatccagaaccgggcggacgcggcggacgcgaagggtggggttgcggcttgggagatgtgtaagggtattgttgagatggggtatgagttgacgctgggtgggcgtattgctggtattctgcggttgttgaggaatatgtgaggtctgttctttggaattttcaaaaatcttgtttcatatcgatcttttgtactatacatagtccatcttgcttgagtgatatctctagctatgggaatatttgactcaaagtgtattcatacttcacatctatgcatatctagaaatcttgttacttcgccaatctaaaatcagggtataacgctaacaacaaagtcctcataaactcggaacaatttcacggaggaagaggagggccgaacttcttcagccagtgatcctcagtccggaacgaactctccatcatccaattccccaatggttcccggaagggttcaagaacctcatcgacaaagcgcgagccctcgagatccaggatatccaactgaccattacagaacagctgaccagtcgggaaaccatgagcatactcaacctgcgcagggagacgcagcaggaaatccgacaaccagcgcgcaaacttcccattcatctcgttgtaggtatttgggttcgtcctcgcaagttccatattatcgacagtccacttcgtgatctcggatgaccagctaggcaaagactccgcactagcacggaggagagcctcgaagaaagccaagttgaggtgtggcttgtcgcggccgatgcgggtcacagcgaggaagtgctcggatgggatggtatagtagacgccgcggccctggttctctgatttgtagcggcagaggaactcgtcgattttgaggagggagatcatggcgttgaagttctggtgacggattgcgttctggattccttcgtgcagggctttgcggtcgacttcggtcagggtcgagggcgataattggccctttccatgggtccaattgcacgaggtcatgcgcagcatctccaggaaagcaacgtcttctggggggaaaccgttgctgcggccgcggaggagatggggtggaaatttgcacaggtccagtgcgggcatgttgacggtcaatcctacatccacacattgaagctcggtggtgaccatcggcaggacatggagcgtgtaatcatggatccctgtcgctgcgttcggggccatccggaagaactccgggggcatgcaagcgatttccctcatcggcccgcccttcccatggaatacgcggacgctgtcgtccttacgcgctatgaacttttcaagggcagcccgctcgctttcatccgtcacgataccggcgttgatccagcgacggtagatggtgaggatctgcattgttggaacctggtcgcgcacgcggtccacggtacaccacctgcatttgaagacggcttcctgtaagcgggcgcgctcgtccagtgtgaggggaacgtagtcgagcgggaccatcatgcggtcgataaccttgctgcgggggttttcgagcgcatcgttccagaacgcaagaaggatgagagcgcggtatatgtgttcaccggagagggcgcgcgataggaacggcgaagctcgagggaagttcagattgagcgagtgtaggaagatctgctcgatgatctcaacgggcagggcctctaggagagacaacatcctgcgggaagtatgcgggcgcgagattctaggtgtgggcgaattagaaggacggtcataggggctcgatctcgaccgcgaagaccgagatgagctgctccgaatcgggttcttaaaggtacgacggcgcttcgatttggggatagcggtagaatgcgaacttgcgggcataggcggagccagctttctccgcgtcacgggttcatcttcgcgttttggtgggctcatggagcaattgaacgttcgcactatctggggtacatcgatctgtgagcttgaaccatttctgagccgtgtagggtaattattcagtgttgcagtatgtttttcgcatatcaactctagaaagtatacaactttgcaggccaagtctgtaaccccgtctgattggcggggcagagcccgacaggtgttagggctggccacttgagggctggaaggtcacatggtatcacgtgatggctccccactctgttcctaaatcgggtctagcccgttatcaaatgacgtcaaggtctatcagcaaaagaaaagttgttgaacaagaagaatgtcattccgaagggttcaacatggttaaattagaaatcagacatggagacattttaaaggctagatggcccatttaggatccaccaattgccccacaaagccagccttgtcgaaagattctgcactttggaataatccagccgaaatcaaggaacagcctggtgtcgatgtcgaaatgacggaatgatcgttggactgcccctggtgccttgtgtatccaatttggcgattgcaaactctcactccttttctctcattcctccacaaaccttgaattctgtcatagcttccccaactacgtcaccggcgtctgcaccttctgatctctgacgcctcgcaagacaagcttagttgcatgaacttgtctatcaatcgccctttccggacaccacttacaccacttacgtatctaaacaggaaattatcagtccctgtcttagatgatcaccgttgccattcttatttaaaccaccggtccatctacgttactatcttcaatatgcaccctttcagtgatccaacagtccatacacacgcctcttccagctcagattctactctcagctccaaaccgagataaacatcttcatacaaaacaaccaaacaacaagaaaactttcatcttcaatatgggttgcgtcgtttcttgcgtatgcgaaccacatctgctttctatgagatctcaactaacatactgcctctagatccaaagcgtcttccgcgccatcggtagctgcctcatggctatcgtcaatgccgtcggctccatcttgcacgccatcatcagcggcgtggtcacagtgatcgatgccatcatctcctgtctgacctgcggctcctgtggaagaagtagacgaagtcggcgatcagcagtctgataggaagcagaccatcgtgtctgtgtgcgcctcttgagtccatggggataagagggctggatatgggttctacgattgttatgccagcgcggattttcttttgtcattataccttcttggagtaaataccccatggcgcagtttttcaattgcgaattatgaatcaaattttaggttacgaaatacttcacctctatttacattgctctcttccataaatgatgtgattgtagaagatgtgtgtacgcatggtaagtcttgaagtatgaattcacattggtgagtattattctcaaaagcaagtatatcaactcccatcttctagtggagacgactcgacatatcgcaacaaatcctgctttgcatctgcgggtatatcaccccaacgctcattcaagataacatctgcgaacggatcctcaggtccactcccatagcgccggacaagggaataatgtgaatgctgtaacggccagcgagcagggacacgacaattcgcagcacggaacgatatttgcagcaagcgacgaaaaggctcgatcttgcgctttcggatgagccgatatgtgatacccgatgatcggtccggcctggcctcatcctcgtccaggtaaaagtccgcagaaagcagctgcaagaactcaaactgcgcatctgaccagggcgagcgcaagaccttgtccggaatacggccaggtccaataggcactgcgcacggcagccggaagaggtcgttctcgtggtatatctcgtgtggtttgcggatctgcacagccccaaaatggaaccagattgccactttgcgatcgacagtgcggtcgacagtgcgcgacggggtccgtgaagtgtcctccagctgtgcggggatcaccaaatcgcctttcccgcgccggccgagtacggcccagtcacaggcttctagattttcgaagcgtgggtccagatttgagagcactgcttggtcatccgggtggaagactaggccggcacatttgcgccggatggtatgcgcaacgtactcacgctggcatttccggaacagggggagtgtgcaccaccgacatgccagcaggtcggtctgtagttgttggcgctcttgccagggcaaggcccagaagtccaaaggtgggggtaggaaatccggggtaaagaatccctctcgcgagcctaaattgggactgctgaatgcaagccgaatgagccaggtgtagagcaatggattggacagggcttggctgagacgtggggaggcacgagggaggttcacttcaagactatgaagaaagatcaattgcaggatttccacgggcagtgactccaggcgcgagcacgggtggtcggccaatggatcagacgggcctgagcccatttgcaacgtgcgtctaaaggtgatttgttattatatggcttgtatagctttttcgtagcaagacggtgttcacttgtagaatcacacggtatttttatggtcgtgaagagtcaggaggaagagcagaaacggatatggtttatctcaatggaaacacagtccatatattgactgcagacttcgcataatgttgtcctgtagctcctcgtgactcataggagaggcgcttgacaacgcttccagcgaagtctcgaatgaaaagagcaattgaaaggaaaaacccggcccattgctgggagaggggtagggcccaggggatgtgggtaaactgaggtgagctgcgtgtcttggcaaggtcagcttgagagctcgtcatcaagcgagattctgtatgtggcttaatcgtcagtgcatctaatcagattggaatagattgctgctcagtatttcttgtcagagttgcaaaaagacccgtttttcgcatgatacttagctatatatcctccttcactcaacctgctaagatatatatcggactaacaatgtttattgccttgttttctaaaccaaagcccatttctcgatcaattggtttaatatctggttgaaaagtactagattacagtagaatctattaatgaacgcagaaacgacaaatgtattgtttctatacacatcccaactgctccaccacactatcggaggtatctgaccacacactggctgaatagccgtcttcttggctccaaaagtcatgatcacgtagtgcaatggagcgaggaataaaaaggcggatttgaggccacaagagtccacgcttaaacggcggacagatcgccgaagcgctcctacataagggaatggtataagtatcgaaacagacgcattgttctcagcaagacagtcaacacataccttgtagccagggggcatccacttgcccttggagacgagggaagcggtcttctcgtcgatctcgggctgggcggcggcaacctcgtcctaaaaaagcaagcatgtgagtaatggtcccaattctgcagtctaaagcagataatacgtacgacagtgaggtcctcgaagggacgggcggtctcgatgttctccagggtcttctgcaagttctgcaactcagcctcaaccttacccttggtagcctcggcgttctgaacagcctgggcctcgaaggcgtcaatggccttgagctggcggttgacatcgtaggtagcgggcttgaaggccttgaagtggttctcgagctcgtcgacgatagcctggttcttcaggatgccgcggtagtggctgaagtcaacagtctggggttgctcggagaggacctggaccttgcggcgagcctcgtcattgcgcttcttgaaagcttggagcgaggtagcggtctggccgcggaggccgagggaggtcgacaccttgacccagtcgatcttgagagcggcgctgcgctgttttcgggtgaagggagttagcgggagtcatccagacgggttgacaaggaattgtcataacgaggagcaggagcgaaacatacagcagccattgtgacgggtatgatagaggttgggggtggggagaagagaggggagttcaatgtgcagggagttgccgaacgaggagcgaccggaaggtttggattgttcaaatcacgtgatgtccattccgaaatccaccgtgtattgtataggcgacaaattataaagcgatcgtgttaattcttgtaaattacttatagacagcttatatctttgctcactaccaagttcagattgattaattgactcatccgcgggttcaattgttttttgggctaaattgtgtacactatgggcgacaacatgccagatatctccatctggaaagcataacccaagtccctcgtagaaccttaaatagggtcactcgttatatgctgagagccatgatggagttaacgatatcgttgtcgttctcccgaagagccttgacggccttcttgcgggacacgtttgcttgtgccatgaccagctcgatatccttggactcaaggttggtctcatcgacctcctcaccatcatcctcctcgtcctccttcttatcctcggtctcgggggccttgcccttgccgagaatctcctcgtggtcgtgaccggcgtggtcgccggtggcctcggaggcagcgagctgctgggcggcggaagcctgggcctgggagttcaggtcctcaatcttggcctcaccgaagatgctaaaaggtgttagtaaatgtagttcacggatgagcgagtctaattgggttccacgtacatccagcagttgctgttgggggaacggtaaacctcgggctggttaacaacgaagaggatctttaattccaacaattagcatctccatggtcagaatatatcgagttatttcatctcgttggtagcaagtgttgcgcttcatggtcgcaatcacattgtacttggcggggtagaaaatgtcatgacggtcgcatcgggatcacatacgttcttggggcggcggagagtgacacgggtgatgccagggacgagcttcaggccgagcttgccaatggccttgcgggccttcttctcaccacgagagtggatagcgacagcggcaccggcgggaatgttgggctcatcgccagcctcggagccagactcagaggagctctcctcgacggtcttggtgacctcgtcatcgtggatttcttcaacgcggggatcagccatttttgcgatgtaaaagggcctaagatgaatgcgaaaaagagttgattagttgggttggttggttcggcaatgggtgtcagggctggttgaatggtgtgagagcgggcatagtgggagagaatggtcaacccccccacgaatcgcccacaccaagggaagggcggaaactgatgttgaaaagtcgataattcagtcgagtaaacactcatacatacctgagaggtaaatatcaagctgttgggagtggggatggattttgttgaaggtgaaggtgcgtagctgtgcgccagaccgaacccgaaaatcattagcgagcgcgcgcccccagactgccctgcacacattgccctatatggaactacatcaccaattccaaactagattggctaatcatttatagatcccatctagatcaaaataaatatatgaataatacagttaatacagtttgcaggtcattatttacgtatctgctcgttctattctttttgtagagccagaagttcaatattccccgttggggggatataaaaatgagtccagagccagaggtaaaccaaatgacaaaaggcccctttgccgggatatcaaggattttgaatcatttttgctgttcattgatgatgcatacagcgattttgccagagtattaccagcaatggaaacccttccaggacacctccttcaaacccatgcaccgaaacctcgtaaccatctatgacttgttggcagcgcgagccttggcgtgggacttctggacctcgtagcgagcctagagtggtgttagttgaactgcttgtaattcccccagattatcagatcgggtgggcccaggcgcattcatgccagagcgatccccccatttcaagatgtcgaacgtacctgcttgcggaggcgcagaaccttgaagcgctcgaagtcggaaaggttcttgcggcgctcggagcggtcggtgcgctgagcgaaggtgctcttggcccacttgccatcaatctcgttcttagcccaaagcttcttcacgggaccggtaccggcagcacggggaagcttggggatggtgaagtgagtgagggtagcgtgggcgagggggagaacgtgacggggcacgatcttctgctcctcggtggagggaccgtcgaccaggacctgaacaaaaaaatcgcaagtcaatacacattcccagtcttaaagatctccgaaaatcccgagtccttcgatttttgtcacgatttccggattcagagggcgattccacatacacggcggtggtccacgatctcaacgatggcagcaagcttgccttcgaaggggccgctgcggatcagcactaggcggccaacctcaaccagcttccacgaagcgaccttgacatcgatatcggccatggcgaaattctgcgggacgaaaaattcagcgtcgcggctctgtaatatttgtagattgcacactcacggtcgacagggggtatgagtcgagagggggttgtcgaaagagttcaattgtccaagagttgtctcgaaattcggatgtgcccacactcgcaacattctcgcttaaccggccacttgcaggtctagggttctgattaggtcagcatccgcattaacaattatccgagcccgtgcatttatctagtttttttttgccgcagaacttttgttgatctctttaagctacccagctttacaagctccagcctctgatgatgagtctgcgttgctttcagtttcgacaactgctcaaatgtagcatttactaaggtatgctcatatccatattttcccctcgttttccgttcttttccccctcattcctcatatgatgccgtaatttgcgattgacccagtgtctgtgaggccctcgccggggctctctatacagcactgtcggatgatattcaatttcttacatattctgatatggattataactctcacgttatattgtcaatgctattgagagacatcgcgctgactgtttcaagatttaggacatctgccttgatatacaaggacttcttgacaacaccgcatctcttcagctttccacagggtacgttcatacaatcctccattcaacacccccaggtccgatgattagaacattttatcacgcctagatagtaattgagcttctcgctatgaaattacctaactaccaagatctctgagaacctatcaccttgcacattattgcttgttatgctggttgtgacttgtcgctaaccttcaaaagaatataggaacttctgtgtcagtctggcagtttgctgtcttatataccatcgaaatgaacaatatattagaacaacaccttgtccatcagtagttcagttggtaatcttcctaaacatccatggataacttaatttacctcggttcatccatgttgtactccgtaaatagtacatctacaaacacctcggtacaaatgcaagtagttttgattacaataagtcgtgctatatcgttacctcggccgtgcaatgccccagagcaagccatttgtcccttcatgctatgccttcctaccaacctagtctatctctcccaaatagcaaagagcaatccttccttgcccttctcgacctaattatgacgatgcagagccggtagatgccacagatgacggtccctcgcggctgagcacccacatgaaaacgaactgaaccgcgtaggagtatacgaacaagaactgaccgcgtcggttgcgctgggaccgggccacagcctgcatcgaaccggcatgcatggcggaatcggtcgaatcggggagcagcacatatttgagcgagcgaagctagagtttagacattagcaaatgcggaacgaattgaaaagcgataaagtcgtcactcaccaggaagaacgcattggccaaaaatgtgtacgcgaacaccgtccagccaatccagcccctagtctcttgtccggggttgaagatctcagagacaaccatggtgacaatgattccaacaaacttgtagcccgagtacgccagcagatccagcagctgggagtcattgttgatgctcaaaatgtaagtcgccagcttcaagcagagaatctcaaatgcgatcactgcaatggccgtggtggtgatcgaaccgagaagctctgggtggaaatcgcctcggaatccagccagtaacaccgacagcagaatatatgtgaccagggccatgacgggaatatacatgtccggtgagttcaggtcgtcgcgaggaggcaagaacatggatgagtattgttgctgtatgatttgaccacctggtccagaagttggagccatccgggcttgctgtcgggaccagggcttgtgtcgccaagggaagaggacaaggaccagcttgttcaggacgtaggagttggagacgttaaagtagtgcttgagagcgggtatagagacatagcgattgaactgtagattatctccaggttagctataaacgatagaaatttgtagatgatgcatacgttattttccatgtactcctgtccagccgccattgcgcttttgccgacttggaagcccatctgagccgtgggttcgttcatgaacccgccgaatccgggagtaccatagccaccctgagccggtgacggttggtacgggttaccgccatatccagcactcgggggttgctggggagctggtggtggaggtgagcgcatcatagggacggtcgagacatgttgtgggacggggtgatgaagaggcggcgattgcgcgggtggcggagcgaaagagccccgatacataatgcacctgaatagggaacgaagataggagggaaaatgagcgtggaagttcggtggcgaacgtgtcgtctagatcgtgtgacgggggtttggggaagaagcgaagttgatagcggagggaagtgtttatacgtggctgaagatccaatccgctctgagctccccaacttcgcccgttccgccaccaacaagtcacaccgggctttttttcctcctacatttattatctgcttctcacattcgccgatcaattgccggagatactcgaaatgttggaggcttttgaaattttaaccacatcgggcgtggtgctttggtctaaggcctacgctccggtgggcgcacatgttatcaacagcctgatcaacgatgtctttatcgaggagaaggtcgtgccgcagaatgctacaactaatgggatctcgccggcatacaagaaggagaaatatacactgaaatggaagagagtcaaggaattcgatttgatcttcgtggtatgtctgtcgcatgcgcatgcgctcgctgcttcgactaactctgggtttatgcaggccgtctaccaatcgctactccaccttggctggatagacaaacttcttgagaacatttcaaccatctttattgatctctacaaggaccaggtgaagggaaaccgcgcgagaatccagacctatcggttcgatcaatactttgaacagcaagttcgggagcttgaagacaacgctggtggattcgtagaagaacatgtgccagagacgggtgaaaagaaagacccgcttgtttcgtcggacaatggaggcccaccgccgccaccggtgcctggcctggtgaaaggtatggaatgacaaaccccagttttagtttcaagcgcatgctgaccatcctaaagcgcagcccagagctgcgctagccggggcgacctctgatgagggtacgccaccagctacaccagaaatttctagatcttcgacccctcagggtcatcttcttacagccaaagccgggcctggaggtcgtggctctcgacgttcccgcaaggctgccaattcgaacgccaacgcatcgtctggtgatgaagcccggaagggaaagcctgtcaagtcccctgtgaagaagatgcgcagatgggatgctagtgggatggcagatgaggatgacggagaaatcctcgattattctgcccccgcggaggaaggagagaccgtcgcccctgcggtggaggctgtctccgaggaggattggggtcgtcgaaccggcaagggccaattcgtgctgaaagagttgggcgaggaagttcaatccatcttggaccaagctgatgctgaaaagtccaaaggtactgcttcgtctggtgtggttggctccgggttcaacgcaattggtggcttcttccgtaacatcgtcggaggaaaggttctgacagaatctgatctcgagaagcctctcaaggcgatggaagaacaccttttgaagaagaatgtcgcccgtgaagctgctgtccggctctgcgagggagttaagcttgagatgattggcaagaagactggcaatttccagagtactgatgccgcattgcatgtggccatggaatcctcgctgcggaagatcctgacaccgacctcttctttggatttgctgcgcgagattaacgctgtggtcgctcccaccaccaagcagcaggcgcctcgtccatatgtcatgtctattgttggcgtcaacggcgttggaaagtcgaccaacctgagcaagatctgctacttcttgcttcaaaacaagtaccgtgttcttattgccgcttgcgatactttccgttccggtgccgtggagcagctccgcgtgcacgctgaccgcttgaaggaactgagcgttcgtgaaaatgcaggcgatgtggagatctaccagaagggctacggcaaggacgcagccaacgttgccaaggatgcagtcgaatacgctgcggccaataagtttgatgtcgtcctgatcgacactgccggtcgtcggcataacgaccagcggctgatgtcgtcgcttgagaagttcgccaagttcgctaacccagacaagattttcatggttggtgaggctctggtcggcacggacagtgtcatgcaggctcgcaacttcaaccaggcatttggcaccggtaggaacttggacggtttcattatcagtaaatgtgacactgtcggcgacatggtgggaacactggtcagcatggtccatgccacgggaattcccattgtgttcctgggcgttggacaacattatggagatctgcgagggctcagtgttccctgggctgttagtctgctgatgaagtagggacgacttgatatcctagtttgttatttctatttcttagctgtatataaatccttactttattacctgcgatcatgttgctatagtctcgtataatgaatcccccaaaaaaaacagaatctctgtacagtcaacttactgatcaaatataaagccacaacctgctaaatttgccatcaaccagccaagtgggcggggcgnnnnnnnnnnnnnnnnnnnnnnnnnnnnnnnnnnnnnnnnnnnnnnnnnnnnnnnnnnnnnnnnnnnnnnnnnnnnnnnnnnnnnnnnnnnnnnnnnnnnnnnnnnnnnnnnnnnnnnnnnnnnnnnnnnnnnnnnnnnnnnnnnnnnnnnnnnnnnnnnnnnnnnnnnnnnnnnnnnnnnnnnnnnnnnnnnnnnnnnnnnnnnnnnnnnnnnnnnnnnnnnnnnnnnnnnnnnnnnnnnnnnnnnnnnnnnnnnnnnnnnnnnnnnnnnnnnnnnnnnnnnnnnnnnnnnnnnnnnnnnnnnnnnnnnnnnnnnnnnnnnnnnnnnnnnnnnnnnnnnnnnnnnnnnnnnnnnnnnnnnnnnnnnnnnnnnnnnnnnnnnnnnnnnnnnnnnnnnnnnnnnnnnnnnnnnnnnnnnnnnnnnnnnnnnnnnnnnnnnnnnnnnnnnnnnnnnnnnnnnnnnnnnnnnnnnnnnnnnnnnnnnnnnnnnnnnnnnnnnnnnnnnnnnnnnnnnnnnnnnnnnnnnnnnnnggccggctggcccaatggcaaggcgcttgactacgaatcaagagattgcaggttcgatccctgcgtcggtcaatactttttgccctcgtggctttctttttgctctattgtcagaggagatgtggttcaactagcggctggttgggtggtatgcagtagggtgtgtggcgatttagtttttgggagtggttgctgagttattaagagcatgaaatgagagatcactatgttcagatatgtttcatatgatcaaggataccgatggtgctggcggaactacatataggaagagtgaaccattgtggatgcagggttgggggatatcaccgaattgccaatatggcacagctatcggtaaatgcaaaccccagggactagaagttgacagctatatatgtcagtggcgatggtggaggtttcaggccgaactacgtatcgttgaatgctaccctatcagtcttgttcaatatgatctagatgagtagctctctgtttgtttatatcgaatcaatcattcttctcttttattcctctcctctgggtgtgctagcacatatcaagtcaagtactttaccatattagaaggaagtgatcattctaacactaccagtggacgcaacgactcgtttgcggatccgagtacgaacaggtcgttagcatgttgatccatccctagccaaaatattattccaactagtataagactctacggcaggacaagctgcttaaggcagagttatatctcgatatagctggtgacgtcttggcgtgtgatcagtacgacagacatcgaaggctataatatcgagtgcgccgacaaaatgtaacttgatcaccaaacagtaatttaaacaagctgtttaggaattgccgccagcagtaaacatacctgcggtaatttagcgaggagtgtgttgcttgataatagtgtgttcgtggtccttctcttaaatataatgcctttgaagaagaagatccgaataatatcagagggctggtagcagacgtcgataattggacagaatttgaaacgtgcccatggccagcggttcctaatagacatcgacgttgtggtctagggaagagaagttgacgctgatctttggaagagtctcgtgacgagaacaatatctttgacagaaagagggtttttcgaaatcgaaataaacgattatcacggtgagtgaaccgggccaagttacagcgaaagaaggatacgtctaggaaattagctgtttatatacatgtgtatcaagtcggggcattgttggattcgccttcacgttcttggattgtcagtggttggcacatgttgtgatcttcttcttaactgactatcttcaagaaatccttacttggccttgggccttcgtccacgattattccttcgcaatgttttgagtatgttaaaatggtgtcacaagtagccatttcagtggctctattaccgtcatttggtgctgtggtgtaatatatagagttaaggtacatgataaagcaaggggcgccatgtttcgagtcgtataatgtgtattttgggtaatatgttgacgatatatgtgtctgcgttactgatttacatacgtatcccttaagagaggctataagagctaatggtaattatatggatgccattggcgctatgcatacaaggggtgtttccagttatatattctggggattatggcgaatcctacaaatcacatcagtatgatgcctacataggtgggcccacctaataaactgtatgatcctgactgctatagcgggtcctgtcttttccccgtaaatatccttgattttactgacttggtcttggatagaaggaaatcaagttatagctgctggaataacttgttgagcctcggcactaacgcattgtaacacaagatcgacacatgcaagggctatgaacatataagccaataaggaatcgacaagcctcatgcacctgggcaggtaaatcaaatgaataattgtcctccgtaccactacccagttaactagttagctccccaggtgctcgctctgctcgctctagggctgcccaggtgcctagatcaaatgactcagcatagatctgcaacatcgcttacatcatcattgtgtttctccagggcttgatccggcctgagatcttttgcagccaacttcaaccatccaaagcttctccgcaatttttgtttctcgacctagccctgcatctacaaatttgtcctcttggctaggcaaatattccatccgcgcaggttgaaacttataccaagaagctctcgcacgacattgcgtctacaaccagactttcagcacgaccccaagcgcatggttagctgtgacaagtcttcattcaatatttattttgctggcgtgtcgccagaatgacgggtccagacctggcttcgctcaatcgccgctcctccacgcagcattaccacaccttcgatactccgccgcccaagtcccgtgggcgacctaactcgggccagtccgagtcctctggggatggctcacacgatacccacaatgagatcgctattcccccaccaaaggcatcaccgctgccgaagaggcaaatggcagtgctagcgataatagcactggcggagcaaacggcgttgaactcgatcagtccatacctcccggacatggcttcgacattccccgaggtggaatcgacccaggtgggcgtatacgtgggcagcattgcatcggcctttgcgctggctcagtttagcacaaactatttctggggctggctttcggaccgtgttggtcgcaagccagtgatcctgcttggcacctttctgactgcgctatgtttccttgcattcggattctgcaagactcttgtacaagctattgttgtgcaggcgttgatgggtgtggtaaatggaaaccagggtttggtgtccacctgtctcggagaaatcaccgaccgtcgcaatcaatcccaggcttttacctacctcccggtgttgtacggaattggaggtataacgggaccactcctaggaggactgctcgtttttgagaccaacccttttactggcaacaaaaatccgtatccctatctcgcgccaaatatagtgtccgctgttatccttctggtggactttgttctcacagctattttcctggaagagagcctcgaagatgcagacagtcttccaaagatcggcaaaaaggtgcgcagcttgttcgcatggctatggcagttcactggcaattcccgtcacccgacctatgtggaggtccctcaagaaccgatacacccccacaaccaccgcgattcagaaaccgagggtcatgacagtgatctagattctgcgtctgagatgtcaagcatccttggccactcagaggaactcagttgggatgagatattcactcgtgatacactcttacttcttttgacatacctgatctttgctctctgcaacgtgtctttcaactcgttgttcccaatattcgcgcaagccaagcctccggccggaaggtcgctcaccccgtccgagatcggccttgctcaaggctttgctggaatcgtgacgattattttccaaatctgtatcttcaaccgtctgcgagacaagatgggcaatcgatggtcttaccgcgcaggcctatttggctttgttgtctcgttcatcctgatgcccttcattgggtataagagcaagtctagcgaagggttgactggcaagtccgccatcatggccaccgagctctgccttgtgttgctggtcaagaccatcgcctccgtgggtggtctgaccagcgctctgcttctggtaagaacttacgatatgcctctttcgataaacccaagctaataattttcctaggtcacaaactcggcacctaaccatgccgtcctcggtgccttgaatggccttgcacagactctctccgcagccggacgtgcagtgggcccattcctctccggcggactgttctccctcaccgccaagttgcagcctaaaggagaggctgtggcattcggagttttcggtgcggtctcctttatcggcttcatattgagcttcggcatccgtggccgttcacttgaggcagagggctggggcgaggacagcgatgcaggaaagtcggatgacgaggagccgagcggtgtatgattagaatacacgaacctataaaatgtgccgacatgacgatgtgacgagtttatgctttcgttccagcctgcttttgcatttgaatatacattagcccccgtttcttttatgatagatattgctgttgctgttacattacttgctgaaacaaaaccgggtgttcgattagaccttgagcctgaaggttttattcgagatattgccatgaccccgacgaataatactattcaattactggggtttcgagatacttaaacttccctttatgggtagattaaagccgagtgaagagataaaaggggaatgtctactattgtagtaagctaggctgggtggctgaaacagatatctccttttttgcaaaacattggaatttgttctctgctcatacggacataaacaacaagattttggtaaccagacagcactaaacataattcgaaactggatagagaaatttgagttgaaggagtgttgaaacgaaagagaactcgaaattgaaagataaacaagggtatatggtatatagcacataacgatcgtgacagtaaatcgtggaaaattagcgtgaaggagatgccaaaaaaactaaacagacaaaccaagcagtgaaaaacaaacgaatcaagcccagcgccagcccgactcttgtggcttttgacgcttgataacatccgacagcggggtattgccttgaccaaggggattgcgctgattattttcccgttgacgctgaagcaaccgcacagcagcagaagcatcaatcccttcaccagtgtcggtaatcttaagagcccacttagcatcttgcgtattaaagccaagctcattgaccatcatatcgatggcgcggtcaacagggtccagaacctgcggtcgcagaggcagaggcatcatagccggcggaggagtataaaacgcagcaaagccagtagtatgatcggacgaatgagtcagggtacgaggagcagtcccagcagtcgaggtcgaggacctgtcaagaacgagcgcaggcacagacggaataggccggtgatctcggatcgacccgttgagattatggacaatagtgctgaactccgacatggggcgttcagcagagaaagaaaagcggcttgtggtatcgggatcgaaaccgcgcttacggcggcgacggagctcgtgggcgaatccggcttgacgctcgcggatctcgcggtcattttcgatagggcttgttctttgcgggctgagttcggtcgggctgtcgagggcgcgttcttggagctcgtaggcgcgcgagactgcttctttcaggaatgaggagcgacttgcttcggtttcggttggttcccacttcgcgagaccgattgacttcgcctttgtgaatgtggccgcggtggtgtcggctgggcagaccgagctgagtgttaagacggcgcctagaccaagagtgagaatgtaggaagtccattcctctatacttgagagttagccgtgcttaatatgagagtttggtttcgcttaccgagaacggtctcctcgcgagccagatcaccatctgggacgttcatgccatcgaaaatgccgaccttgcgagcttcaatgcattttccatgcagtggctgcaacagaacgcccatgcacgtccagatctccgtcagatcgtacatctgtttctgcgatagaccggaaagattcccacgaccgaatccctcaggcggttcaaacagaacattattgatagcgaaaggctgtgtcatcgtcgaagccgaggtgaagtgattcttcgcctggacaccacccttcaaccagtccatttggccagcgatatcattctcccgccccttcccactgccgaaaatccgacagaaggtccagagccgccagaacgcatcgtcgacttcttcagcgcgggtgttatccacacccgccagaccgcgaatggtatcgcgacgcaggaacggcgagcatcgcgcaaggaccaacgccttcagcttggcaagggtgtatatatcctgcgcgtacctctgcagatagagcgtgggcgtgtattccggaacctgggagtcgggatttagaaggagctgccactccatttcccacggcggactcatctcacgcatttcccaagcgggcggggacattttgaacagggcgttttttagcatgggcagctcgcggcctttgaacgcggtgtagatctttttgttcacgagggcgaagttgaaaaggtcatctagagagtcgatgttctgcataattgacagaatcaaatccaccggcatatcctcagggagggggatattggctgggacattgcgattgacgttgggagggagcgcggatgaaggagacgggggagtcgcggggagttcatagatctgttcggcgagttggacgctgcttgcctgcgcagtcgagaccagggcccaactctgacgaattttggaggctatgggcttctctagtttcacctccatggcgagaggggacaacagcgcttgttcgacttgatcgaagggattcccgggattcgtttgcaaacgaggcaattgaagtagcaggctgtcgcgcgtggggggcagatcgaggggatcaacagaacgcgattccaatgtcatgagagagtcctccgaccgtgagctgacgctaactgcatcgcggggcgtttgcatttgcttgcgaaaggccaggaaggatttcttggattttgcttttttgatttcctttgtgtcgggcttttcgttaatctccttttcctccctgcccgatcgacgggccttgtccttcccctccctcctactaagtttgtggcttttttctttgcttagactcgaacccctcgatatgatcgtattcacccgactgttcttcgccgccttcccttgcggtgtctgtgagtgaggcttcgtggagggggggaggggcgcgggccggctagcaatcaagtccccattatgccggctgatctgcagcggcccgtcaaggatcagcgtcttgcgagatgaatcctggtcattcaggcccgcaagggtatcttcgagttcctcggcggcctgcgacaatgttgggacatgacgagtgcgatgactagtgagatctgaccgttgactatgatgctgcggctgagcctgactgcgtccgcatatatggcatggatggccggattgccggtgggtattcaactggtgtaacatggaatgcttccagtcgtcatggctcaccgtagattgtcgcaacgagaacagcgagtctctcatggagaattgccttgaccactgtgacttgcgtggtgagactaccgaaaggggggagtcgggccgacttgagactgaactgggaccgaagaatggttctagtggcaagggcttgttcctgtggttgttcattgatgcatttttagtgctgaggattgggaagccgagttttgacacgtgcaggtggcagggcgaggaaggccgcgaggaacatatggagtgggtatcgtcgaagaccccggcggcgacgggggaatagatcgagtatgcatcggcggttttatacgggtatcgtccatcatctccccagaatgtgctgccgacactggtcaccgaactgcgatggctatagcacgacgaagcacaatccaaagtctcatcagtcccagaagacgagagggtgatatccagtcgatcggcagatccatatgcatcgcaagcgaagccttcagagcgatataaagtatgcactcgttcttctagttcccgttcgaaaaaagagggccccgtcgagcggtccatattgaaatcagcgctggccggggagacaacggagaagtgtgaggacagctctggaaaaaagcggaccaagcgggaaactgaacgcaatggagggagatggtccgacaatggagaaatttcagaatcgtcttgggaatcccggggtgattccaagtcaatcatagtgcccaaagattccgacggggaggcagactcggtgtccccgaggcactcgcttgtggtatattcttctttgagacccaagtggtgtgatttgcctcgggtatcttcactatcggatgccatatgtgtcgagggggcctctggaactgctccagacgggccatgggtggtatccgcaatctgcactggcattgtctgtaggtctttgttgactgtcggactcgatcgatctgaaacagtggcccggactatgactcgagtttccagaccgaagggttttcttcgaagcttcaatgatagaggacgaaagactatttttttctgattggaggtcttagtcctttgatttgagggatgacgacgccgagaaggtgacattgacaggcaataagtcatatctcagctctttttctgtatcttgattcatggggcattgttggcccgaataggctgctcttgccctttgttagcatgtcacgatgttacttcaagtccccaatcatctgtcaattgcgttagaacataccttaagtccgaattttggtggaagcagactcgtggaggcgttctttgtagaaaatgattcgtctcggctgtggctgcgtagaacaaagaccagaacccaaatgttttttgtctgatcttgcaagtataggagtttgcaaagaggaaatagcaaagaagctcggaatgggaattattctctaataccgcatgacacaggcacagaccggttgatatcgtctcgaaatcagcaagtcctacggagtacaagggtctgtctgtacggagagtatggagtttctcaaaatgacatcccagccgaataagcagaccgtcatgattagtctgtcgattattggcttagtgtgctgcagctacgcagcgataccctggggtcaaaagatcaccccaatccccaattgagtaagtcgttagatgaggagtaaaagtgttgattcaattcttactagaatagctatttctatagccatagttgcatcgagcttcgtgttcatccgtactcacggcgcagtgagtttacgccccaatgataggcggtaaattgtaatacatccacaacatactgagtatatgcatgattgtccggttccccaatgaccgtgaatagctggagctgtttcggatgtacatcgtattatagtggccccagttttccgcatatggagaagaccctcccttgccgcgtggggtccaatttaaaactgacatcctatatgaatatcgcccttacgtagggcttggacttggatgatttgcgcatgcacgaaagtagctcgagtccacatcccctgcaagtgttttccccatcgtcgccttgctttcacagtagaaaaactcgcccaccaaacttgaaagcaattctagactcctggtgccaccgatgatatgtaatatgaacaccgatgaagagcccgaggaggatctagtgggacaagatactcggtagagatcctcgtaatctcgcccgctttgaccttgtttggactatctaggcaagttactcggcgatcttgcccagtgcgttaacctaaggcttctctgcgagatttgtctttcaaacatgataccccagagtggtaggactaagccacgaatgttaatgtttcacgagcggggtgttgctaaatatattcagggctaagcatttcaggaacgagaagtctagaagtgtagaagaagtagatgtgaaatacgagaacatggaatattgccatgacactactaataatagcacaggaggggctgcttttagtgctgacttgtatcttgatgtctcatgtctcttatacgaacatttttcgtctcaagggtctatacagctattcatttatctctaaaggtaatatttcatctgcaggtctctgcaatagtattttttgtccttctttgtcgaacttagaggcagattgctatcaaattccgtacgaatcttctttatgcaatttagtatctggtacacacatggcagtgcttaagcaaataaaactaagaccagagattatgggcagctaggtagacctctcccatatgtaagaagcaaaacagaaaataattcacttcagttttcatctaaaaaccacaaaatcttgcaatttctgggccgtgaaatctctttgttctacggctttaagctacctcttcctcgtcgagtccttgactctttttgatcgccatgagaaatgtgtgattgggttatgcgttattgttgaataatgtctgggctcaatatttcagttcaaatgtatggatatgaacttatcactagaacaagttagttcttcgactatttgttcatttgtgctcttagaaccatcctcgcctaccctttcaggagggattcatgttgctccttacccaataactacgcctgaatctatatttatcttctttgcttcctgtgatcaaagaaaaatgcagaggattgtcacatactaccatccctaaaggttggagagatgaaaaagatataaactagctgtgtgtcaacggcttcacaaacctcataaaatctacaatacaccctgtcagtatcatggtcggttttgacgaagaaatgctggactcttggggtccagcagtttggggagtcatcttcgaccgattgcaaagcggaaatgtcaaaggtggtacgcttcaggttgcctggccaagcaacgtcgacaggaaaacagcagcccagcaaatccaatgggccaccaagttgcctctcgcccacctccctcaaaaggcactcgatataatatttgacaaaatggttggtttctcagtgggggttcgatatatggaagaaaagaagatccacgctatgcatggactcctaaaacacaacggaccactcaaagcgagtgtggaaaaatggttcagacggccggggaccgtcgaaaaatggaggggtttgatccggtcttacaagagttacgaagatgcaatgggacacttgtcggattgcactacgttcccaagagaaaccgataatcatccattcaagacccaccctgcatacaatgccgcaatgcaatgctcttcctgcttggagttcctggttcatttcgggatcgtcacgcccaatggctatgacttatcaggaagaagctggatcgaggcaggattgaatagtcctaatatggatctgctcacctaccttgtcagcaatgcagatcctcagcatctgatcaaacccagagatatcagagaaacccacgaaaaccacatccttctctcactcgtcggtgtcggcgcattttctcaattcgtgattgccctgaacaggctacgccaggcaaaactcgtgcccgtcgacgaactccgcaaaatcttccacgaagcagcgatgcatgagttctgcgctgtcgcccccgtcgccgtggcagaagcactctaccaacacggaatcaacatcggcaacgtcgagcaccagtaccacgaactcggcggacagctagaatcctcctggcacatcgccgcagccttcaacccagccggagctgagttcatggcctggctcgaaaaattctccatgctcaacgccgaggtccgaaactcagaaaacatgaacccgttaatgtacgccgcgtgcttcgacgagccagcctcaatcgattggctctgccagaaatgcgatcccatgcagcccagattaaccggaggcgcgcaggggtacgccttgatctgcgcagctcgaagctcacacctccacagcggcgagatattctctatcatcatctcccacctacccgataagctattcaccaatgaatacggcaaaatcttcggcacagagatcgccgaaggactagcatcacacaagcgcaagctcgccgacggccgagtccgcgaccccacgcagaacgtgatggagctgctcgccgtgcgcaagatgcaagcgctcgtccgccgtctgtctaatcactggactgggagtcaatggcatttggctctggatgcattcatacgcgataatgatctggggatcctcaggcacagtatcggtacaggcacgcgtctgcttcggagcagctcgcgggatggctcgcgcaaccgccgtaatgtacgctatcccaagagccctcagctaagcagtatttcggaacatgaggtgttgccgagggagaatggtaatgggtcggatcctgctctcgcggatgctattaggaggaataggcctagtcgtgttactgctcgcagtggcggcagacagactcttggtcctatcagggattctagcaatatggtcactaagaatgtgggtaggatgggatcgaatcgccgaatttgagatgttgtgtagcggcctggcgctgaagcatcgaaacacgcttctgcgtgtgatgttatttttcatttcgttgctttatgttgagtttttacattgttgttgatgttctgattcgaattcctatcgtactgtcaaaacccagtatagataccgttatttttcacgttacagcatgatcatgtgaccttttgtgcgtttttgattactaagtttgtccgtcatccatggattttcggaccgattgtttttagtttcttctcacattatcgaatcagatcattgtctattgcgtaacctctcttattcaaattaatatgatgatatatccctctagatgtcagtccaatcattagataaacaggttgaccaaaacaaaggatgagattcggacaatctaccagtcaagtgcacttgaagcaccgctctgcgatccaccgctaacacaatctagctctttgcaaactgttgccaattagtaaacagtgaggtaactggaaataaaatactcacgttggtctgccttttggaatagagtgcttccttctggcttgtgcatggctgggaggatctgacccccttcgatccgttcgagctttgtgtgctcctggagtcgacataagatttgacgtgtgtctgattaattgagttagacaatagaaaggaagttcatatccaagatccatacctgtgttatttaactcgcccgaagacctagttaaaataagaattagcgacaggtcttgttggataatagcttgaagtacccacccttgcttagtagagatagattgatattcaacctcaatctctctaatcaaattcttcgtcacactctgtgatacttcggatattttctgaatttcaggtttattgacagcgcagtgggcgaagaggtcgtagcgaatattcgtcttcgactcagaggcgggaaagaaggaaagggcaagacataaacccgcatcctgaaatgaataaataagtgtaatcgggaataaggaacacttttccagactactcttccccgtcatagccctgaaaagcttcatggcgggagatggcctcgatacttcagacattctctgatgtagctcgctggtataggtatcgaggtgacgagatcgagctattaaagtgtcagctattttctctaataattctgacatcagttgcttacttccagccttccaattgaagtctcccgacaaagtcagaccagaaacccaagtagatttccctctaagaccagccaatccactcaaagctgaagccacaccgtcaaatacagccggctcaccagaattgagattcacaaagatcaacccctgatcagtggtatgagtatgaacctcaaacagactattctgcgacttatcaaacccaggaacatcatcaaactgaggagccttcaccagccgaccagtggtatcatagctccagccgtgataacgacaaccaagaacagtcgaggcaccagtttctttcctggtaatagtatacgcacgatggcgacacacattatgaaacgcgcggatcttgtcgtccttaccgcgaatgagaaacaccgggaacccggcgatctcgaaagattgatatgagccaggcttataaaactgggagatatgggcaatatagagccatgtctagaatgcgcattagcgaagctgttcagtgatgttgttttggaatttctattacttggctgaagagcgcacgccgttcgagctcgaagacttcccgaccgctccaccatccttctgggatttcgggttctttggaaacggtcaaatctgagttatctagcggggtgattgcaatagatttggtgactttatcggcttttggttgagataaatggggccatgttcggtggagtagaaagataagtgtcacgacggccacgaggatggaggttagagatgttaggtagtctgtatcggtggaatccatgataaataaaggattgctgttctgaatgttagaaagtggttggcatgccctgatatactgtcactgggaggtttacatgttacccctccacacattacactctccacagttagcgcagatgcctccattacccgattggattggaatttcctggctgtatcactcagatgacttgtcatttgatcccgtatggttgggattattgttatcatacggtgagtactgtgcaaggcattaagatatagttgcattcacattcatatctcatatctcatcaaaatagcgatcattatattcctgcgatactacgctgccatttgaaccatggagggcgcgacatgctcctccagtcctgactctttcgctgccttggcagtcctgtcaaactcatgctgctcgcagaccatatcaaacacccgtctctggtagtctaagggaaatatgtgtgttagcattattgcatgaactaattttaaaagccacaactccaactcacaagacacgccattctccttgtttgggttcagaattccctcgtgataaacccccctagccagattgctctgggccttctcgcagagctcgaagtcttccatagccacttggcgcacgaatttgaagtattcttcgaacttgtctccagattcaagatggaagtagtcaaattccatccgggtgacctgcgggtcagcggtcgggcatactctgaagcaggacatgccaccaccatagacattcagcgtgcagttgggaaagaagtacaggaatagaccgtcatctgacttgtttgggtctgcgatatgctgcgagaaattgtgcttgttgcgcacggtgtagaaggtcggcggatagtatttggagaaagacgggtgagtgtattggcagtgtagacactcttgatatccgtcgaccctgacgaaagttaataataacacagtagaaaagggtaaggtagaatattacatggtcttccagttaaaccggccttcatagttgatgctccgacggtgcggtagtttagtgaagtcgactttaccgagcagctcctcgagctctgggaagaattcatggaaactaggagcatcgtcggagatagttgagaagaggagtccagtgggggtgagatgactgcgcagttctttaccctgtagatagcagtgtttagaagggacttcacatttcatctggatcacacgtacggttttcgcgcagacaaccttcagctcctcatcgacggggttcagagtatcccctgaagtgcgaacagcggagacagaccgctgtgcaatctcgtatggaacatgctcgcccacaacctggaatctggtgactgggccgagcaagtaccaggactggagcatatcttagtcttcttcaactgccagaactgagaagactatgttacatactttgagaaagacagcccgccgctccatctgatataacggctggctgcagtaccaggaggcaggcaaagtgcgaacaagttcggacatgataccgataaaattagccagtggattcaaatttcagataaagacgattggagtggattgcgacagtgacagcgaaagagacggatttttatatcgctatagattattttctttcaatagttttatcgatctggattgagagaaatgctttttttgttggcaataaggttgtccaaccttgagtgctggacagatgcggtatatcgtttcccaaacgagttatcgagtcccgtcgatgtcacgcttgatcacatggcacacgcagatctgagatgttctagccgtgtaaggccctaaagatagacataatcttttcagggtcctgggacttttgtgagctgagtcaaaggatctacgacggcatataccatacccaagtaggcatttttagcctgtatgtgctcaagctagattttcaagatgaatgatattgagagaattagtaaactgaaacgttttacaaaaatgcccgatagcaaaagttgctccaagcatttgtggtcctatgtacttgacttcctcctttggtttcctagaccttgcagctttttgctcactgagcacgctctcagctttcaaattaggggtttctcttggctagttaaggggaaatataagacataatgggggattaaggaaataattttgtgttccaaacccctcggttttggatctaggaatctgctatctaataatcaacgcgccccgcacagcccggaaagtaacgatctctggcagactgatatagttcatatagttcggaccctctaaagtatttgattcggcaacattattccacacgctctggtcgtgttcatccacctagataatcttgatcataccagtagtaatcgcctcatgcataaataattcataaatcggcaaagtcagcagaattatgcgcataattagtgtgtttgccttgtttgtacttcatttagaccagctcaggtcattttcgctttatgttgtacgcacaatttctttgcgtatatttaaagaaagagagaaaccacaaagctgcttaatacagatcttttgtttgagatatatatgcaaatacaatattggtgccaacctaatatcccctgcgcggctcggatatgatcctgcccgttgaataccgccattgtagcatatcgctaattttactctgtcctgaagagctaaccaatgagagtacaatttctagacagtttctcctagcagacctaacgaggtactctatttcaaggggatgacgagtaacattgatggattttacgaaaaccatactggcatataaaggaaaagaaatacggcacatgtgcgtatagaatgcatggaaaacatgtttccgcagcctttgttgaatatcgagaaaaccaaaatgctatagtgatatttcacgcagcatggcaggaccaagcgcccctttgattgacgggcgacgtaaagaattcctgataggtttttgtcctttggcgccctgtctagcaagcgaatcatacgtagcctgcccgtatggtactgccgtatcatgttgcttatcaggataggctgtagattcagctataatattgagttgatcatagtgtttcatcatacattgcgccaatcgataatcaataccgctggtatcaatccaccgctgctggtctagtatgactactatttcaccatttgagctaacatatagtcggttgtcaataccagtcccatcgaggcaccgtaagaaactctccagagcggcttgatctaggtcacatggtaccatgatcgttgtagcggccacaaagccaatcaatagaaggagcaaaaggacgcgaaattggcgcatgttgaaaaaaaggtatgattggaaaatgtaaggtttcttgtatgatatgcttgggattaggtagaagtctcggggaggatttacagaagataatcgccttgctatttactagacctgcatgaaaacattctgtcgaccaggaaggcccactttctatatcgtcgttttgcttccttgttttgtgtactcagtcatttaccaccttgccgtgattatagagcatatagtagtaggatataatgaataactacttggaatgtgctcatgtaaacaggtactacatatagaaatgattgcttcgctgcactcttcactcgacgttgaaatttccgtagtctgaagtcctggctatctgaccctttgccaagaggatccccttctccagatgctgttaaactgaaatggcgattttgcccgaaaacccacgattgtcctcacattattggtcgttcatcgacgctaccgaccttgttagcactagtcggtgtagtggattgggggcatttgatcgctgcctaatatcgtggaatcttgagaaagccttcggaagaaccctatacccgcaagcctatgtgatatactaagtaggtcttggtcgtaaggccatttatattgtaggctgggttttctttgcgttgcaatcgagtcggtattcacctgaacggttcttcttgcaatttgactactggctggagaaaccacatcttacgagtcatgaggagacatcagatcgattggaagatgataaattgctgaccgctcattctggaccaccgtcctgaagtattttgcgggatattctaggtcagcaaaacacagcagccccgatgcactccacgcgagtcagactttcgaatgatctcacgtcattgtctttccgatagctgaaaacccctctctgtttgttgagagcttaacgctatgcggaacataccgaagtagttatataagtgacccctcccccgatactttgatcccaacagatcatatgagagccattttttctgatcatacattttttttgctattcaacatgcgccagtttctcggcggccttttgctccttctgttggttggctttgtggccacttcacatgcagtgcctagtagtgcaggtgtcacaatcatcatgggaccaagagacctaaatcaagccgctatagagagcttcttacgtgcctcgatgggacttgtttgactaccgaatatatgttaccccaggtggtgaatagtagtcataccagcctagcagcggtcgcttgatactaccggtattggttatcaattggcgcaatgtatgatgaaacacaaatgaaacattgggtcgtcatcaatcaaagaggagcttgatcatgccacatgtcacgttgcattactatggtcatctcgaaaaggctgcggaagtcatgatttagatgcatactatacgcgggcgtgttatagtcatccttcttcatatgccggtgtacgctatgaaaactccagcaacaataaatagctgcacatgtttatatgtctttttgtctccatcaagctttagagagcttgatggtagttagatcatcaccggcatttcttattacatctgttgatcattttctctgtcactcagatatctgcgagcaacttggaccacatactacacatataccctatacttttctcacaagaaattagagaaccaataggatgagaagtaactatacgaatggaggccaatgtacataaagaaggcatgatcggccaatcacgatacgtattagccatcacgtgatccattagacagaggaaatatggtgagagctacatagagttaagaagtacactataaccacccaaaaagaccaggaatgaaatacaattggaacggaaactgcaagatatagagagagactgatatttatttattctatttccctctgttgaggttcaaaatgaattcagctgcctagaggatccgagagtggccaccgaaggcgaaagagcaaaatagaagaagagagagattaattcagcttcctcaattccagaaatcaaacatttcaccaaaacgccaacgatccaaagagccagaagaaagagaagagtgaaagaagcatcacctaactaactataagagagatcagacgatccgtatctcttatcgggcaattacgtcgtcaacttccgccgacttgaaaggttggaactcaacaccttcagagccctgaaccttccatgatggccccgatcaaatatactcctcctcctacgccctcacctccagcgtcttgctacgccatgagtgacgacgaagaagatgaatacaacaccatcgcccaggctgcctcgaatagaggggtcaagctgctcttctccaaaagcaaagtatgacaatttccaacaaggaggaataccaatctaacaataatccaggtctatattcatccaacttcctctgccaaagacaatatccctggctttatcgccctcatccagcaaaaacctctccccgcatcacatgcatccgcgactcatttcaaaaaccccgatacaccctcctatctcctcgcatgggtcccagagtcctcccttggagaagcttatgatacatacgtgaaagtagacctctcggaaggtgactcttcgccgcgccagaagtacttggttccgccgcttccgaccaccaccacctacaaagaccccatcggactgtattcttttgcagttccgctatcacagatatactcgcttttagtacgaccaccgagcattggatggtggtttggaagtttagtgatcaacacccgagcgggcgatggcttccccgcgctatttttccatgacgacgaatgcgagtccaccatcttacaaaagaggaagagggtcaaggaaaccttcgatccatttggcaaggaagggggtttgttttggggcggcgatgaggtactgcgctggttacggaagtatgcggaggtgcagcgctcctcggtagacaggaacgtctacctcgttaacccgtcggatgaggaccagctgtctttcggccagctggtgacccatggcgacaaatccatcccagggcagacacagcccgaagccggggcttccgccggatcccgagccgaacagcctgatgccagcatggatccattcatgaagaccctcaaggagacacggtggaaagtgctggagcagctcagcaaaatcacgacctttacccgtcggactgccaatgatatagtcgataaccctctcataccgcctcagatgcgccgtcttttgaaaaacccagagatccagacgttgcaagatgagttcgacagcgccagggtctatctggctcgttgggcgatgagtgttgccgagcagagcgacaaagaccgaaaccagcgtatatggaccgcgcaggatatgctggaaatggagaatagctcggttggcgactttgagatcttagagctggagaccgggaacctggctatccaggagcgacgccgtgttctccaactggaagaatgggagggtttcttcgacccgacctcgggtagactccaagtcacagtggaggaaattaaagagcggattttccatggcggcttagatcccaatgatggcgtcaggaaggaggcatggctcttccttctcggtgtttattcgtgggatagcagccacgaggaacgccaagcaatgatgaactccaagcgcgatgagtacatccggctgaaagcaggctggtgggagcgaatggtcgagggcaactcaacggccgagcagtttgatcattggaaagagcaaaagactcggataggtgagattatacactgaattcgacatggtggctactaacacatggctatagaaaaggatgttcaccgcaccgaccgtaccattcctttatttgcaggcgaagatattcctcatccggatcctgattctccgttcgccgagacaggtaccaacgtgcacctggagcagatgaaggatatgctcttgacctataacgaatttaacccagaccttgggtacgttcaagggatgagtgatctcctagcgccgatatatgctgtgatgcaagatgacgccgtagctttctgggcgtttgtcgggttcatggatcgaatggtatgtttccacgctgcaaatcgccgcattctcttactaacatctctgcaggagcataacttcctccgagaccaatctggaatgcgtggccagctattagctctcgatcacctcgtccagctcatggacccgcagctctacttacatctgcagtccgccgatagtaccaacttcttctttttcttccgtatgctcctggtgtggtacaaacgggagtttgactggagcgatgtcctgcgtctatgggagacattgtggaccgactatctctccagcagtttccacctgttcattgcgctcgccatactcgagaagcaccgagatgtaatcatggaccatctcaagcactttgatgaggtgctgaagtacagtacgttggcattggcatctgaatgtaaattgatttcaaattactaatttcgtatctccagtcaacgaactctccaacacaatggatctcgtacccattctcacccgcgcagagtcgctcttccaccgtttcgagcgttccgtgcaagccatcgacaagagaggtaacttccccactgcgcccaccgctcaccaacgtcgtccagggacaagcgaccaagattcatcttcgagcaacaagggaaagtcaccccagctcgctgtcgggtcaagcagcggagtcaacaccggcccctctactcttcaaaaggcaatcgattcccagaagccgaaggtggtttctccagagctacgcgaattacttcgcaaggacattccctggaaacgccaacaaacttcatgattggcatcgtgttgaagttgggattggatgtctcgcttgatatgatgttacactcttgaccaagtcatgctttcagttctcgaagtcttggctattgacgatttacgattgcctcatgtatatttttcttcgattttctttactgtcggttttgcggagcaggatatggctcacggacttttatcttgaaatgagcaccccgcatttgaattctccaattacgctgatagagatatctacaataggcagactccacgtagaactacatctagtaaggtaatagactcgtctaataaggaccgcggcataccaaagaatacattgttgtcaatatagaagtgtttaaagctggtcaaacggtgctggattgcgcgagggagatagcttcacgagatattatcgtcagtactgcaaataaagtggcatatagggtagatggtagactcacacgaaaagacaaggctgctcatatagacgtcaacagccgccagcaatgattctggcgcgcatatgcctatattcatcgttcatgtaacgacgtacctcccgatgccgctcgagaacatctatagctcagtgctgatcactcagtttataagccagcgcgatatcgagggagcgattcacgtacgcagtattacgagcgtcgtcagcatctagccccaaccacaggatctgtcggggactgatgactgagaaggaaatgataagatgagagaaaagaaaagaagaaatgcaggaggagaaggactatgaaaggcagaaaatcaacgataaataagaaaaagaaagtttacttggcccgaagtgaccagcgacgaccagggtctaattccttacaacccatctgcggtaagaccaaacctccagtgaagttcgctcctgtcctagggccgtcgcgtcgtagccagccggatgtattgcatccgcctgtgaagatataccagtctttccatactgggagtgttgggagaccgttctgcgagatcgtaattgttggtctgtgtggtactcttgtcttacggatctctcctttagagtcgaagtcccaagcgaggttttcggtgcggtaactatgtcgtgattcgtgaatgcaaagcgaggcaatggctgcgtcgccggtcaggcgtacgtgacgtggtcgccacacgatctcgatctcgccagtggttgggtcgattacgtcttcttcgtgctctggcagtgtcgtcgccgcttcgctggcttttctgggtttcgcagtcgttccatcgccggcccagtcaagggggatcgggtacattcgtagacgtggtaacacagtagataaagagaaatcgacatgtcacatgattgcgtctcagagcaggatgaagattcatgtggcagaataaattgctggttgatgtaagactgggatttggatcgcagttggcacctcttcagaatagtgattcgagtaagcggcgacttctactgcgagccctttcttgctctcgcacattgtcaattcactccagtctgtctcggtatggattggcgcgatcagcactcgagctatgttcagggaagtatctcggtgattgatagatggactcttgatgaggagcacgggggggggggggggggggtgnnnnnnnnnnnnnnnnnnnnnnnnnnnnnnnnnnnnnnnnnnnnnnnnnnnnnnnnnnnnnnnnnnnnnnnnnnnnnnnnnnnnnnnnnnnnnnnnnnnnnnnnnnnnnnnnnnnnnnnnnnnnnnnnnnnnnnnnnnnnnnnnnnnnnnnnnnnnnnnnnnnnnnnnnnnnnnnnnnnnnnnnnnnnnnnnnnnnnnnnnnnnnnntaggagtgagtgcggggggggggggggggggggggggggggggggggggaggatgtagagtgtaagaatgagggaattcgagaatgatacttattttacaattagcagtatgaagatcatctgactggggattacgtcttttggattctaattcattcttctgtcaatcatcagcagttattagtcaggcctttctttgcactctttgcctcatatcagagatgttggaggctcatgagagtagtttacttaattaattatacattgaattctttattttcccaaaggcactccgtcttagtgaacaagacgtgaatggcaacctagagatatctatcaggcttccaaatgaggaaaccctattagtgttgacagaaattgttggtttagcgcgattatcaaagagctcgatgtctaagttttgctgtccatttcgatatagaataattttcttatatcaaatgtctatcattgacctacttagcctaagccagaatccacgtgacatgctctaacacatgttatacaaagagttggacccatttgctttatattaaggcctttccttctctctcttcttcttcctcttctcccctcactctctcccccctacatcccccaccccctatatttataaataatctctgactgctatatttgacactcaatttgctgcgacatgtagaacagggtttcaccaacctcctgcctatactgagtcccctttataccggccatcgtccttaccgtgcgaactcatattagatgttaccatattggccttatagctaacttaatacagcagacttcggatttcctaacgctccactgcactcgcgagcctcgcaagcatgcagaagtcgtctaagaatttgatatttttatatccattgtttttggattgattttcggtctaagaagaaaccgaagaatgaaaacagccattcaaggtcaactgcattcgaaatgccgccgcctcggctctgccagcgctttttcagggagcgagtcaaataagaactggtgagctttccttaggtcttcgcttttattctaccccttatgcatctacatcgttgcatatcctttcatttgtcttcaactccgctaaccaccgctgcaattacagtcttcagcctctcgagctagagaattgtgactcatagaatgatttccgtcgagcagcgaggtgaagaacccgaaaacgccatccaacaaagtgtcagtgaaccggggtgttacaaaatgaggtcccaaatggatacatcattgctcggttcgagaagtctgccacgcggcttggcaaacgaggattgaagacggtgtcagattgtgagccttcgagtcgatgcgattatgcacagaaagaaagctcggtttaccattgcgaaaagtaaactaccctcgctttccctgcaaccaaaaacaaaggccaccatcagcatggccgcccaaagccaatagccgccgccggcaagcacctgactccagacaaagtgaatgatgaatgccggacaggaacccgttcaggaggtggtactgaccttacccggtgaggaggacgaagccgaaaatgagccatggaggagttgattagcggaaaccgaaaggaatggagttgttctttgagaggggttggagggggtcagatctctcaaatacgcctgagcatatatatcggcattcgctttcacggattgagagagagaggaaattcaacaagactccaggaacaggcaatgactgtcaatggattgaaaacaccactcgcaaagatcacgtcctgacgctggactgcttgctataaagtgcatcgaatttatctttacatacagcgaactgattaggtgttgggtgggcggnnnnnnnnnnnnnnnnnnnnnnnnnnnnnnnnnnnnnnnnnnnnnnnnnnnnnnnnnnnnnnnnnnnnnnnnnnnnnnnnnnnnnnnnnnnnnnnnnnnnnnnnnnnnnnnnnnnnnnnnnnnnnnnnnnnnnnnnnnnnnnnnnnnnnnnnnnnnnnnnnnnnnnnnnnnnnnnnnnnnnnnnnnnnnnnnnnnnnnnnnnnnnnnnnnnnnnnnnnnnnnnnnnnnnnnnnnnnnnnnnnnnnnnnnnnnnnnnnnnnnnnnnnnnnnnnnnnnnnnnnnnnnnnnnnnnnnnnnnnnnnnnnnnnnnnnnnnnnnnnnnnnnnnnnnnnnnnnnnnnnnnnnnnnnnnnnnnnnnnnnnnnnnnnnnnnnnnnnnnnnnnnnnnnnnnnnnnnnnnnnnnnnnnnnnnnnnnnnnnnnnnnnnnnnnnnnnnnnnnnnnnnnnnnnnnnnnnnnnnnnnnnnnnnnnnnnnnnnnnnnnnnnnnnnnnnnnnnnnnnnnnnnnnnnnnnnnnnnnnnnnnnnnnnnnnnnnnnnnnnnnnnnnnnnnnnnnnnnnnnnnnnnnnnnnnnnnnnnnnnnnnnnnnnnnnnnnnnnnnnnnnnnnnnnnnnnnnnnnnnnnnnnnnnnnnnnnnnnnnnnnnnnnnnnnnnnnnnnnnnnnnnnnnnnnnnnnnnnnnnnnnnnnnnnnnnnnnnnnnnnnnnnnnnnnnnnnnnnnnnnnnnnnnnnnnnnnnnnnnnnnnnnnnnnnnnnnnnnnnnnnnnnnnnnnnnnnnnnnnnnnnnnnnnnnnnnnnnnnnnnnnnnnnnnnnnnnnnnnnnnnnnnnnnnnnnnnnnnnnnnnnnnnnnnnnnnnnnnnnnnnnnnnnnnnnnnnnnnnnnnnnnnnnnnnnnnnnnnnnnnnnnnnnnnnnnnnnnnnnnnnnnnnnnnnnnnnnnnnnnnnnnnnnnnnnnnnnnnnnnnnnnnnnnnnnnnnnnnnnnnnnnnnnnnnnnnnnnnnnnnnnnnnnnnnnnnnnnnnnnnnnnnnnnnnnnnnnnnnnnnnnnnnnnnnnnnnnnnnnnnnnnnnnnnnnnnnnnnnnnnnnnnnnnnnnnnnnnnnnngcgggagggcggtgggcagcggaggggggggggggggggggggggggggggggggggagttcatgggaggaatgtttactagatgttaacaccccgagcgcgctaagcgtctcggctctctgtctcctcgacagcttcttctgggcatttggggggatctaggcacgcagaaacagcctgcgccctaggcaagtgtgcaacaagaagcatatggatcgtactgttatcttaatccaacaatcaatacttctggcgcttcgagcgctcattcgcagtccttgtactttttggtgtcttcgtcgtgggcacctttttcgctttggtatctcttgtcgttgtctcagaactatagctcatggaagtcgagatatcgcgcattgatcttggaagatctttaattactgaaatacgtagcgtagcgtcttgaatatgaagaaaatgtgatatgtatccaactattaaatgctaagataactctatcaaccagataactgtagggtattgttgaaccacaccaaatcccaaaccaaacacaaaaccaagtgagaaacagattcgccacgctgatgcaagtagaagagaagatataacccgagataacggacggcgtcaaaatgtactgccaaatgtccatatgtccaagagcgcagggccaggacgtgaagaaaaataactgtagacccatccatgacgggtgaagcgggggaataagaagagagaaaaaatatgggaatcaaaagaagagaatttatatgcgaaggatcattctgtcgaagttcacggcctgcgagaccccagacccttcagcacgacccgcctgcttgtgcccattgagccgatatcgccaatgctgcggactttgggtaaggagtgttcaatcacgctgccatcgccaatttcaaatcggtcatcagcatcgtggtcaggcggcatgctcagtgcaaaatggggtgggttctgggagctggagcggcgggtcttttggagaacatctgcaacccaggcttcaccctctgggctcatggattcgtaccgagcacgcggtctgggtccagctaatcccagcggggtggagcgggattcgttggccgtggagacagtagcggttgcgctaggagaatgggcgtccccgactgaatagccagaagacatcgacagacgtctaccggccgaggaagggagaggggagacagcgggctgaggcgaggtaaaggaggagatgtggcctgtcgacactgccctagtgttcatcacatcggatgcggttgagcctcgtcgtttcttgtgaactgtaagggatgaaggtggccgagcgctgagcacggaggatggtcgagagggggtagcccggccagaagcaagatatgaggtagccggggttagcttagtacccggagaagcgtggggtggtgaggaacgtgtctttataccctgcacctccacacgaggcgtttcagacaccttacgacgaccgtgatgaatgacatattcacgaaggtattcgcccaggtcggcccatccaccgccaacacgaaccatcactcgctgcccctcttcgccaacggtgcgaacgaacagttttgtcggtgcggactggcccccatggtggaggtggtagagtttgacacagctgtcctccgtcttgtaggcatgagagtgccgtcttcgggcagcgggcattaatgtcagagaaggtgcgggcgtcgtgctgcgagttggaccagtgggagattcggatctgtaccgcattcgtcggtccacggatgagaccgatgaggatgcgtctacttcgtggttggaatcgaccaaatggattttacccggcagcgagttgagaatcgagttgatcttttcgtcgagctggtctcgcggttgtttgctgtgcttggttggcgaggaagggcggaatccgaaatcggtgagttcggattcatgctcttctacatatgacagctcttgtctcttcacacccagactttcgagactcggatgggtagtcagtcgttgacgccatcggagagacttgggctgaagaagatgttccatggcccttcgagcggaattcatcccgaacgtctttctgtttcgttccgcaatttttgccatttcattttgagtgttcaagtcacttgcagacttccctcgtgacaatttatgctgagtcgggagacgtggaactggtggaatggacgaagcagaagtatcttggaatgtgattctggttcgtgtctaagatagtcaattagaatgagcatattatcaaatggacaatgggccacatacctttggggattttgcgaagtcggccgatgtaacagagtgtgttctagtcctagacgatttcacactagccacacctggcgccgactcgcttcccatgcccaactccaagcgttcattgatgaaccgctcgaggggtagactgaccgtgcgattttgttggaaggagattcgcgggtcaagcttctggttttccaaacgacgcagacgatcctctctcaaggtatgatccccatgcgaaggaggatgcgtagattcagggcgagacgatggcccaaggggtgtcacattagaggaagtaatgtgctgcccatgtgtctcgggactggatatgagagaagaatggtctgaaagcaaagaacccacagatccagtagatgaccgacgacgacgcgtgattttatgcgccactttactatctttgtcgagatcatgcttcccttggcgggatttggaaagtctaatggggctctgcaatggcttgggaacattccgttgacaagattctgctttcccttcattccgcgggtggtgagactcgatcgagcctgacttgggtgatgccaccgccatgggtatttgggaaaccctgctaggcggtctcgatttcggcactcggattactgacctgtttggtgtgagaaccggggagatagttgctgctaccggagtatcacactggttctgttcacggggccggtttggagatttagggtcctggccagcaggagaaccgatggttttaggcttaggattgagttccgctgctttgtgttgtggagaaagttgtttttcctcctcgtcggaggtctgttcttcttcaccagccacagtatcacgaggcaagtctttgcgaccagcgggggcattcgcctcttccgcggcggcaaccccaacagagaagacgaccttggaaatttggacttccatttcaggtacagtggaatgttgaacgaatgaatcgtcagtatgctcggacaatggacttggtcttgtcgatacctgactgggaggtgacatagctccatcgagctgttggaagccgggcggaggaatgttttccttgttttccaagctgcgatcaattgcacaaggcgtagatgcaggagttaagaagggctgtcgattgatcgcaggagttggtggaaagtcggactgtgttggtgtttctaaatcctcatgcttctcttccattggagacttggatagagatattgagagtttgagctttggcgacacattcccttcgactgcaggaagtggcgtctcgttaagaggcaccgtgttgttttcaacagattgcgagctagttggttttgcgtcactggatgagtgtccaataccacactggatttcaggctcatgcttgacggcctgctcctgggggaaacgacgatcatcggaaggttccgatacaactgtatcggaagtttggtcctgttgtgtttccttcaacgactctgtgcgttgtaggtcggctgcgcgcctctcagccatttcagactcggcttttgaccggagccacgcattgtgaaccttgtaattatcggcctcgacaacccacgcagcaaaatcagactcaatggcttccaaatcatcaatccattgttcgggcaaagaatccggacgaccttccaacgcgtcgagaactcggtccatccgcctccccacagccacaactgcggactcaagtttaacatggtcaacagctagagaagcatcggataattcggtagggtcggggaaaaaagaatgtggggctctgatggcgtggagggaggagtcaagggcggagcgggtcaagctgagctccctcagcagcccaggaatttggcgtaagacaaaaatgcgaatgtcccaagtggctagtaaagcgttcagtcgcgacaggtatggaagagcgcgcaaaatggttgctgtgatgacagctgtaaagtcactcagttgtacatagctgagcggcggaggcacggacacacagcttgtggcggacgagggccgagacctggagggaatgtgggcattcaaaacgtgttcctttaattcttccacgttaagatcttccattccatcgcggatttcgtccgccctcctctcgtatcgctcgacgacgctggctgacaagcttccgtagtagctttcctgggtgttgctagggggagccaaaaagccccaagggatagaattttccccagagcacgactcagacggaggaataaaacccatcccgacctttgcgtcgcgttgatttggccaatcccatgattggacctctttatgccacaagttcaggttttgggcagctaccgccgcgcgtatccctagggcgcgttccgaaggcgacacctgggagatacttcgtgaaagaatatcatgagcaccttgttcattcgaagggactgcgtcgatggatgtgagggcttggagagttgattcgggagaaaggttactgaggagagggtcgagttgctgatagacggagccggggattctctccagtgaggaggttgagcgcgagttgtttcgggagtgggagggagagaggcgaatgaaagggcggttcggatttattcgagtggccgccatgccgaatagatgctcagcctaaatctgagatgtaaagtcacagggagcctcgactggctcgaggatggcatgtaagtgacggacgtcggaacgagggcgggaaagaagactgtcgagcccgcatgctgagacgcgcgtcttaagaaagtgcagaacttggctagcagctcgaaattggaaaggaaataaagaaatgaggaaaaatgataaaaacgattggaagttgagggggaggtcgaggtacaaaggtgagaggatgcgagaagcgagggacagcggagagtggaggggtgctgaagtgggcacaaatgagcgacaagaagagaaagaccggctttctgatcacaatgatatccaaacaataatcggaagattttctgaagttgaatttattattgaagtggagattagatcaggggaagggccctaaggtcctagtggagttgccgacacgaaccatcgccgggtgatccgccctttactatggggatatactacagttcttcagttcattttcttatttacgatataacttggactattgaagcatatcggcggatcggaggcttgtggaatcggtgaggaaagcagcgatataaagaaatattactggaaggggaaaacaaggctatttgaaaatagcttcaactatagacgcaaggagtaagaatattaatatttacccaattatttcctatgacctccatagcaaggccttgatatagcaaaatcaaaacaaattacctattcgatcgatctctatcactatgcggtaatgatggcgttgtcggaactgatggcgcacctcctagcctagggccgaggaatatccccgagaactcttcagagttgcagagttgcagcaaaagtatcttctaacaagccagtctatcatcatgcaagggtttcgctaccgcccagaacttgtgaaagatcttccggaagagttcactaaagagctcaaggaatatgaagattggttcatgctcgatgcgcccaagttgaagatgatcacagatcattttgcccaggagctggagaaaggtctgagcgttgagggtgggtctattgtcagtatcagttggccttgaatatcaagtagatgctaactgaaacgttgacctgaagcctatgaatatcacgtggatcatgagatacccaacgggtcaggagaagggacgcattctcaccgttgatctgggaggaaccaatattcgtatatgcgatgtctgtttttccacggggaagagagacttcgagcaacgtcagcggaaatacaagcttccggatgaagtcaaaaaaaccacgaaagaagccttatggggtttcattgcggagcgaatccaactttttctcgacgaaagtcgctgtgaaattgagagtgctagcagtgctagcagtgctagtagtgctagtagtgctagtagtgctcccagtgctcacagtgctgcccgtgctgccagtgcttcaagcccactaccgatggcgttcacattctcatttccagtggagcaaaagtctatccgcagtggtattttgcagcgctggaccaaagacttcgatattcccggagtggtagggcacgatgtagtaccgcagctggaagaagaacttgcaaagagggtaagctcacgttggataccaagaaagtcggagctgatcaaagtagaatgtcccagtgaaagtggtcgccctcgtcaacgacacagtggggacccttatcgcgtcatcttaccgggatccgcagataaaaatgggcagcacttttagtactggctgcaatgcagcgtacatggaagaatgccgtttgatccccaagcttcatgattcaggactacccgaagatgcaactgtaatcatcaacaccgagtacggctcctttgataacgagcgcaaggtgctacccttaactccatttgaccgacagatcgacgatgagtctgcccatccaggcaggcagatctatgagaagatggtggctgggttgtacatcggagagatgctgcgcctggtaatgctgaaaatgcacgacaaaggtatactcttcaagggccaaaatgtctcacgtcttcagactgcgaactcattggagacatcgtttctgtctactgtcgagaaggacatgtcggaaagtctgaccgatatgaaagaggagttcagaaagtgcctcaatctagaactctcattggatgagctgaaagcgtgccgttggcttgtcggcctggtcgcgatgcgttcagcgcgtctatacgcgtgcgggattgcggccatatgcaagaagaaaggaatccgtcagtgccacgttggcgttgatggtgcggtgttcaataaatatagtatgttggagggacgggcaagccagggtcttcgtgatattttcgactgggagccagacagattggacctgatttctctgaacccggccgaggatgggtctggaataggagcagcgctggttgcgagtttggctgttgacccgggtgaactagaagagtgtggcacagaggaatatttgtaaaagtgaatgccatcaagctgttccaaagtgagagagaagagttgtagtgaaatcataggacgatagcgataagcacgtaagtgaggtgtcgaacctccctccattccccaactcgcaaaatgcgattccgaacacaaataagagacagcaggaccttctccagtaagaccaattgttgaaatagaagatcagagctaactcaatcagagctcaccgcgtcgctgtcctcgctaggcaaggtatgttggatgcgcctggagcacgaagtcatccgcttcaccatcatacctgaccaaggcacacaagtgtgggcgtcaataccggtcgtatgcataatgatatcaatttatcagtcatatgatctatatattgaccatctcccaggaaaccattttcgatgactcgacctacgagctacagtccaattccgacgccatcaacatcgaagtcaacatcagcgtcctaaatcgagccctgcgctccgcctggggctcaacacatacacagctccgcctaactaaaaaggacaaaattcccctcttggcactaacagtcctcgcatcagaatggacagagggaaacatggccttggccaccaataatgacacagatggctttggcgacgacccaaatccagacgcagctccagccgatacgacgggcgatcggggaccacgcgagcgccagacatggattacgcaagaaatcccgatcaagatcctcaacgaggcagcagtcgaaggcctgcacgagccgcactgtccagaccccgaagtgcacattatcctacccaatctagcgcagttgaagagtatctccgatcgcttcacgaaactcgcatctacagatagcaaaggtcgaaagccgggtgtgatggcgcccgatgcaccggggatgcactctgtttctttcggcgggccgggcgctagcacagctgcgacggcactgtccaccaactcatctcccaagcttgaattatctgctaatatgcatggctcgctacggttggctattgctacggacgagctgcgcatcgcgagtgtctggtctgatctcgtgaacccgccgttggaccctgcgcagatgagccaggagcagatcagccagcttcccagtgagcttaatcggaggcgggaggcgagtgagggatctgagtctggttgggctaaggtgcggattgatggaaaggattggagtcgggtgcttagtattgggaggcttagtcccaaggttgtcgcctgtgggttttctgataggttgccactcgctggtgcaagtgctgactcgatttctcgtttgttatgtttaggcttcgtcaatgagatggcactagttttatacgtttatctgccaggtaatggacagggggaagaatcttgtttaacggtgagttgacattactccaaggatgcattacccaacaaccaagcgttctaacagtcgtcagtattatattaattccttcaccacatgatactgtccgtggtgaaacttgggctacaatgtcatcttcgcaaggttcaggcgttcgaaagtcggaatgaattattagaaatcgttattaagacacatgcatgtcagaaaccatgcaataagaaacccccaggtcccaaaagttccagcaagcaacaaaatgtcaggccagaatagaacagcaaggggaggaggatgatatacataatgccaggagtacgagcccttgactccatggatgaggtggcaccagggaacagcaacgagcaagctatgtgcaaaagcaaggcttccgataacgttcagtgagcgagaatgcagagagatgtcgtgtctgccgaggcaaaaaaacaggacacatgcaggttgatggggcaatgacaaatctagtaacaggggaaggttatattattcaagggtaggggatgttgttcatcaaagtaatcatgtgataacaaataaaaggcataacaatgaaacgaacataatgagacaaaagaaaaggacattatagcactcagctagtcgagagactagtaaagtactatatcatcagcctttctctctgaatggctgatgattatttagccatcacgtcaacgtagcgtcccttcttcttgccgcgaactgcgctgcccttgcgcgcctgaggcgcaccgatcaaatcgtcaattgagctagcatgagtcaaggacgaagaaggccgtggcggcgggccactggaactaccgggcggtgttggcatggccgctcccgtagaaacggaccgaggcgcgagaccagggaagcctgggctgggggacaagaaaggcggtgcggcggtagaggaagattgaggccggccaccagagaccgacattgggggcatcgggggcatcgggggcgcaccgttttggggcatactatttgagctcgcagtccgactggggggagcggatcttcgaggagggggcggggtggcatgcacaggcgcgctactaccggggtctttcttgttgacccatttcttcagttccttgtcgtagtaaaaggagctctcttcgccaagtttagctctgataggaccgccaccggagttttcttctttcttagctccgccgaaccaaccaccaaaccagcccttcttgccagattgttggggaccctttttagctgcaacacaagtcagattagcaagtgagataagcaataggcgtttctaatacataccatcttcctcggcggcttttgcgaacgcttcgttggccttgcgatcattctccgctttttggatagccgctgcccgggcagcaagatcgtcgtcgtcgtcatccatgatcgactgcttccttggctgctccgcggcccgtggcaggtcctcctcctgggaaccatagcccatgtctacaccagccgcagctggctcgtaagaatttggctcataagagaccggctcataagatgagctggcagcgggaggtgcgtagggtgactctgagtctggtacactggctggcataccaggagggccttgataatatggggattggctggatgtggcagcctggccaggaggatggtaaaagagaccattcaccatagactgtgcagccggatgagcttcagccggtgacgtagcttcttctaccggagcaagaggaatataagaggattgaggtggtgttggttgatacccacccgcgcttggcgacccataccctggagctccataggacatctgttgatcaatcgagggcgagagttcctgtgagcttcggcgttgtccatagggtgggaagtaggaagcagatctctgagaatctattgacgatcggcccttgaactgctcaggtgaggcaccaggcgcatattggctcgatgggtgatacttggacgcgccgctggtaggaataagcggcgctccagccgcggctccaggataagagccgtatatttcagatacagaaggtgagcggctaattgttggggtgccggccacgtttgcaaaaggaccaaactccgcatgctcgccacccttgccggatccagtcgatgcagcatcgctatcatcgcctaccacgaagctattgaaacgagcccacatagaccccgagaccttttccatgcttggtctcgagatccaagagccactgtcgctggttgtttggcgcagacgagcagacaactcttcaacttccgcaaagaggtgttggtgatagtagggcgagggacgagtggttgctttcaatgccgctgccactgcgtcgcaatagctttgcgcctctaaattgcgaccctggtctacgaggcacctggcattcagtatcttaaatgccaacagatgtggcagatgagctgtgggagagttgccgagaacagacatagcaaactcataggcctcggtcagcaagatagcatcttcatccatcaaggaagaagggcaacgctgatggtcagcaccaaggagagtgatgttggcctgtggatcatccgggccaccgaaaacggcagcgcgcgagaagatgtaacaaacgtgagctgcctccgtccgtccataagaactaagcagatgtccaagagaaaaaagggcttggtggtccccaggacttcggttactcaaaaccagtcccaaggtatccctccatttgtctaaaccctcgagggcatttttggtagacccctggccattggccatgctaataagttgcagacctgcccgggcagacggggcaacgagttcgtcgatgctttcttcgatattgccagcgaaaatctcgtagagggctgcaagtgactcggtgtttgcggatttcgatcggacctcgcggcggacaaactcctgcgcgacctgtttcgatattgacctgtccatggtggatgagatgatcatcgcatgtccccaaagacgtcgatcgacagcgctccacacggccttctctcgatcgccacatattaagtgtagtcgaagctcttccaaccactgtgcatcaacagcatcagcctgcaaaggcgtttccgaaggggcaacccctcccgagggggctaagctgcttgcgtatgatccgtctgcgtcggagttgggtaggttggggaagatgatatgtcggagagaggtttgaatttcaggggaactctccagattaccgtcattctctaccagaagcttcacaactttccagagaagggttttctcctcctggcgtttgtgcgtatcagactgaacctgttcgtagcttggaaggtctgaattttcgaatgctgcaatcttgctagaaagccaagcaaccaaatccttcttctttgactttgccttgagaggcccagggtgctggacaatggtatcagcggagggcagccactcgctcagctgggagattttcggttcaccaagagtgggttgaatcattggcgccacttgtccaatggaatagcgagggacgtgcttgggaaaacaagataccatggatccaccgaacccgaatttgaagatcggagcacctttccatcgttccaagggatcatgctcctgcccatcattgggagcgataaattccagatgatgcgtcggagcacgggtttgatgaacaggcttcacaggagcatacggattcacggtttgaattggcaagcttgaaacttgcaccgaagccggccgttggaggggatcgatgtcttgtccgtaggatcgcgggctcgtcaagtcccgggcaggtgactgagtctgagatctgcgaagtggacccatttggaaatcgctaggtggtggagacaatccattggccgggggagcaggaggagcaggaggagcgtgttctggacccggcgcaagacgctgagcgaattcattgagatattcctgaggggcatagcgactttgaggcggagatggctggagaggtgagcccgcactttctctccgcggtaggttggcaggaccgttgaaatattgcggagcactaggtgggatttgtccgaaaccagctccttgctcgcgcggcgaagaaaggttgatcgcaggctcaagcgatgggggcctgtgtgattgatcaggctggtaagaaaccttttcatggtgtgcaagaggacttgaagtccgtggctggaaaggcaaattttggccaggaacgttaagcggctgtgaggcataacgattgcgaacagaagaggtaggagggggcgcaggcgaatatctcggcaacgaaggtggctttgggggtgcttgaaaaccaggaggttgaggagagtaccttgcaacggtaggaggtccgaccggggcactcgatgacaggctagcatatggatccagctgttcaggtggctgaagtgtggattggattgggagcccgataggttgtggggctggtggtacaacagaagcatattgaacctggggaggaggaagagacgatccggtcatcgtcggcgccgtctgcggattaggggtgtaccgacctgagctggcaggcctagatcttggtggcggcagagggagttcctcatagaaattcttcggcgcaggaggagcggccagggctgaggggggagctgccggaggggggaagccagctacagcaggaatcggtatgccagaggcacatggaagaggaggcggtggcatactaattactggtggaggaacaggtttgtgggtaacgaccggctttcggggtcgggagatatcatctggaaggtcgtaaggagatttataaccctcttttgaccgctcagcaaagctctctcccctgattgccacggggttctgcggctgttgcgagaagtatgatgacatcgctcccgtggttggcggcgcagttcctgggagaggaatattctgcaaaagatcaccagtggacggttggtggggtgtgtatatattaggaacaggtcttggctgagaaaagacttgtggggtctggaacggactgttcaagccaaccaccaaaccgtcgttgacaggctgaacaggggtttgatgagcgtgctcctgttcagagacagactgggcagcttcagtctccagcagtatgtcgtcatcgtccaatgccgcctcccaacgagccgccagatcatcgtccagtgagtcaccgagttcagcttcccaccgtgccgctagctcctcctccgatggatcggccattgtttggggctccaacgacgcagccttcagggcatcatcaaactgcgctgcggccgaagtgtcactaaccggggaatcgagagcaaacccggctgattccaagacctgagatgtgctctttcgtgcgatatgaacaacgggttgctcctcgggctctttctttggggtggaggcgaagaaatcctcatcggcgttcttagcctctgtctttggagccgagatgaagaagtcatctacatcgtcttcatcgttggcaaacacactgtctattgatgtctcctgttccgttgggtgttgaggcgaagccggtgtagactcatctaacaacggaaccccttcctcaaacctggattcagcttctggcggggcaaagataggctttgtctggctgttcagttggtcaaaaaagccgtcctcatcggactccacttcaccgcttgactcgtttgcccagaaaggttgatcctgtgtggttgtatccacgcccgctgcggccggatctagatgggcgtcgttggtcggcgcaaaggcctccgcgataggagatggtgatccggtattcccagattcaacatttatcgagtgagacacgagatcaatttgctcattttcggtcggggcgatggcattttcagttgagttgaagacatcaagactctccgcatcacgtgtggcacctgtgaatgctgtttcctctggcaatggacgtacagcttcttcaacaaaatttggctcgtcgctatcctggatttgagtagaggttgaggcgagctctgagatattatgaggggtggcctcttcggtggagggcagcgtattgctcaggtccttctcgaaggtggcccagggattttcagaatcggcattgtctgcgtccgttcccgggaacagttcgtcggtgggagtggactgagaggtatatttatttttagaagtgtccaatgtaggctcggatgccgttgtttcctctcttggaggtgtagtctctcccacaaacgtcgactccggcgctgtttcttgttcaggtgcgacagtgggcacaacagtatctgagttttcggtatgaacagaaggaaacccgtttatgatggtgggaaagctattactggtctccgcgccatggactgaaggtgcttcaatctgaactggttgcgcgggttgagtttttggcagtgtctggcttaggacggtatctgcattttcaatagatggcgtagttgtatgagtcgctgcgatcgtctcatcggggacatgactgctcttatcgacggaatcggtgtctaggcacatatcctggtccaccactggtgattcattgttcactagcacgtctaagctcgtgtattgaggctgaatcccatctacctcatcggatatatcccacgcagagaaatcctcactctgtggcgatacaacatcgtctagtgacctgtcctttggcccgtccgccgcaatcgggtccgacaacccactctggatcgtaacaggggaattattgttatcgggccgtgatgccggattccatgactccgaatcattctcggtcgcttggtgcgccatatgtgcaaagttattatcgattgccaacgtgactgtagatggggggcgcagtccgcagggaccaacctgacacgtctccaatgacgcctcaggagatcaacaatcgtaaggaaaacgggggtcgagggcgtcaacttaagaatccattaaacaatgtagatataacccagagcaaaaaactcaaagaaagaaatcgaccatgaacacatcagctgatggcgaagggaaaaaccaagcagtcggattgtctgcgacagcgaacgtcgatctccgcctatgattcccccgggggccaaatgaatgcgctgagtcatcaggatgctgtcccgaataggaaaaatacaaacccgtgactcggagtaagggatagtccggctctcttatgctcacataaccttaaaagtgaagtattacgtcagctcgttatcgccgcgaattatgcacccatgtgattgcgtggccccgacaaggcagtcctcgaccggtcttcaaaaggattcggtggttcttcggtttatatatctcacaattttttatggtagtggcattggctgcattctacacaaagaaacggttcattgtgaccctagcagcatccctccactctttcatcatcatgctgcatatgcgttttgaccaataccaccgcacatgataacatatacttgagatgaaccttcctttgatgcaaggcccaaaattaccaccttggatgcaaccagcaatccatttgacttgaatcataccagcttcccgagaatgccttcctcatccgactaccaacaccccctagaccatcccgatgcgccggacgccttctcggactcggacgatgacttggatctagaagagctagaccccagcacgacatccccccaacagtcccgggattctcgggactatactggccgcaaaagaagctacgggccgggtattgcgctgcgcaacttacgtgtcggagcggcaagtcggtggagacgcagtgcgtccggacgtggagacatggaggatgataccgatgcgcttttagagaacggggagacacaaggcttgggggactcacatgcaagctctcggaacttggaggatgatgacgcgcctctactagatcgcagaagctcgactcgcgatttggacgatgagcctgccaagcaaggcagccgcttgcgcttcccaatattcaaaattcctgcattcctacagggcacatcaattcgatttggattaaatgatattccctctgagaaccaacctccccgtgaagtacttgtcggacaataccaggcggctaagtatccggctaatgtggtctcgaatgcaaaatacacaccctggagcttcctaccgagaaccctttacaacgaattctccttttttttcaacatctacttcctccttgtcgctttatcgcaggtcatcccggtactgcgaattggttatatgtcgtcttacattgcccctttggcctttgtggtttcaatatcattgggtaaagaggcacttgatgacattggtcgtcggcgacgagatgccgaagccaatgcggaagaatattgcactgtggcattaggaaggtccaacgagatggaggtcacaaaaaagtcgcgagatctgaaagttggtgatgtgctcaaagtccgcaagaaccaacgccttcctgccgatgtggtaattctgaagagcatttcaaatgattcaggcactcctcgtcattcattaacagaagaacctatccctgggacgtcttccgacttgctcgaaccaggtcagggatcgtccgaacccacaatcaacaccacattgaagaatggtgaagatgttggagattcaccctcagctgatactttcatccgaactgatcaattggatggtgaaactgactggaagcttcgtctgccttccatgctgtctcaatcgcttcctctgggtgatttagctcgactacaaatcacggctagcgctcctgataaaagagtcaacgaattcttggggactattagcttgggaccgcccactgggctctacgatgctcacgttgacaaatcatctgggcctccaaccaatgaaggaacgcctgcgcctgtggaaaatcaatcagctcccttgacaatcgacaataccgcctgggccaacactgttcttgcgtccaataccaccacttacgccgtcatcatctatacgggatctcaaacccgagcttcgctttcgacttccgcttcccgttcgaagacaggcctgttagagctcgaaattaacaacctcaccaaaattctttgcgccctcacattcactctctcaatcatccttgtcgggttggaaagattccaaccaacaaacgacaagaaatggtacgttgctatcatgatctatcttattctcttctccacaatcattcccatgagccttcgggtcaatctggacatggccaagtcggtatacgggcggttcatcgaacgggacaaggacattccaggaactgtagtccgcaccagtacaattccagaagacctgggaaggatcgaataccttctttcggataagacgggaacgttgacccaaaatgagatggagctcaaaaaaatacacgttggcactgtctcatacgccaacgaggcaatggacgaagtcgcctcgtttattcgtcaggcttttgcgttttcgggcaatgccttgattaccccttcaactgtctttggtactcaggccggacatgccacagcgccgcggacaagaagagagattggttcccgcgtccgggatatcatattagcacttgctctctgtcacaacgttacgccgaccacagaggaggaagacggccggaaggtgacgagctatcaagcgtcatcgcctgatgaaatcgccattattcgatataccgaagaagttggattaaagctagcatatcgagacagacaaagtatcgtcttggaatccaccgactccaagcaggttgtggtccgcgctcggattctcgacatcttcccattcacatccgactccaagcgaatggggattatcgtccaattccagcacgatgaagacatacttgaatccagcaaagatgatagtgaaatttggttctatcagaaaggtgcagacactgtcatgacaactattgttgcagcaaatgactggcttgacgaggagactacgaacatggctcgggaagggttgcgaactctcgttgttgggcgcaaaagaatctccgcacagcaataccaagatttctctgctaaatacaaacaagcgtcactgtctttccaagggcgagatgcaggcatggcgaaggttgtgagcgaataccttgaacaagatttggagctttccggtgtgaccggtgtggaagatcggctgcaacgcgacgtcaaatcctctctcgagctgttacgcaacgccggtgttaagatctggatgctgacgggtgacaaggtggaaacagctcgttgtgtcgctatttctgccaaattggtctctcggggccagtacattcacacagtcaccaaagtcacagacaagtcgactgcccaagaggctcttgacttcttgcgcaacaagactgactgctgcctgctcattgatggcgagtccttgaacctcatgcttggtcaatttaaaacagctttcatctctgtcgcggtgctacttcccgctgtgatcgcgtgccgatgctcccctacccagaaagctgagattgcagacctgattcgccaacacacaaagaaacgtgtctgttgtatcggagatggcggtaacgatgtctcgatgattcaagcagccgatgtcggaattggtatcgtgggcaaggaaggccgccaagcatctctggctgctgattttagtatcacgcagttccaccatattaccaagcttctcgtctggcacggccgcaactcgtacaagcggtctgctaaactagcgcagttcatcatgcaccgtgggttgatcatcagtgtttgccagactatgtacagcattgccagccacttcgatcccaagggcttgttcatcaattggctgatggtcggctacgccactgtttataccaacgcaccggtcttctccctcgcctttgatcgggatgtcgacgagcgtcttgccaatctctacccagagctttataaagagctcaagacagggaagagtctaagctaccgctcgttctttggctgggttctcatttccgtctaccagggtgcagtgatccagggtctctctcagatattgttggataccatcacagggccgcgccttattagtctttccttcacggccctcgtcctcaatgagcttggcatggtcgccacttcaatcacaacatggcacccggtcatgatcttttgtctgattggtacgctgcttgtatatgcaggcagtatccccttcctgggcgagtacttcgaccttagttacgtgattacccttgactggttgtggcgagttttcgccgtgctggctgtgtctctggttccggtctgggctggcaaaatgatcaaacagtcgtggcacccgccaagctaccgaaaagttcgtggatagagttgctttgtcatgattttggtgtatcatagcattctctcgcttggattttgttatatctctcttctttcataccctagctaccaccggtctagtatcatgtggctctctgtatattaatcttgagcgttttcttgttgagcgcatcggcattgggctaggtacttccatactagattattcaatcatttcagtttcattattggaattctgaccacctagacagagtacaagttcacatagtgtctatattatctccatcaactcttccggaggatatatattattctcattcatgctatgtatcttcgtcatgaacttgaataattgtagcagtcactccagcaattaaaaaagggcatttgaaaccatatatacaacaagatcgcagatggatgttgtacttacatatagtactccgtagttggattgcccttagcaggcggatccccagggccctccaatgacgttacgcagaatcgataagcaaacacgtgaccaccccagtcaggaaggcggtcaatccatatcgaatcttttttttttcttcggggtcaaacatctgctgcatagattctaggatcaaccacttttcggttgctaattcctcgcccgtcatgtctgacgaaattgtctggcaggttatcaaccagcaattctgctcctacaaactcaagtgagtattaatcggagctgctggctatttagtccgcagagccttttatctccgttatatatggatcgaaaaaacaagaacctcccattaaccattccaaccttctctccagaactacgaaagaccaaaacttctgtcgcaatgaatacaacgtcagcggtctgtgcaatcgccagtcctgcccactggccaattcgcggtatgcgacggtgcgaagcgatcccgaaacgggcgtcatgtacctgtacatgaagactgtcgaacgagcccacatgcccagcaaatggtgggagcgtgtgcgcttatcttccaactacgccaaggccctcgagcaagtcgacgagcgcctcatctactggcccaagttcttgacccacaagtgcaagcagcgtctcacccgcctgacgcaggtcagcatccgcatgaagaacatcgccaaggaggatgagcgtctcggagaaaaggttgtgcccaagctggcgccaaaggtccgccgtcgtgaggcgactcgcgagcgtaaggccgagtctgccgctaaggtcgagagagccattgagcgtgagcttattgagcgtctgcgcagcggcgcttacggtgatcggccactcaatgttgaggagggcatctggaagaaggttctccgtggtcttgagcgggctggtgacggtgagcgtgatatggatatggatgacggcgaggagattgaggaggaggaggaagagggtgttggtgaggtcgagtacgtcagcgatctcgatgaggatgaggacctcgaggatatggaggactggctgggagttgactcagccgattccagcgattacgatgacgatgagagtgacgatgatgacagcgaggacgacgaggaggctagcgcagatgagaagaagcccaagcccagtgccaagcggaagcatgttgctccccaggcgaagcctcgcaagaagggtcctcgcatcgagatcgaatacgagaccgagggtgctggcaaggaccagatcatggcatgatttcatcgatgttggaggatttgggaaaagtttacctgatcttgcatggtgtttgggctgtcaattcttttgttttatattcttattctgtgcttagtgatcgggcatcatacccttgctatactgcatccactgcaactcacgatcctagatcttcgaatgtctattttattttcaattctaccgctatcttcaacataatttattgagccaagacctggctgttgctttatttaggtgaaacacgtgatcatgtgggccaatgaatgccctccactatcgtcgcctttcattctcctttaaacaacttcacctcaccaggagccggttcttctgttaatatctcccttagtaatcattccaatcatcataccttgttcaactctttggctctgaatatcttgcattcggtccccacaagtaaagctccagctccgcgccaaccccaccccgtatcgaagctgccattctgcagacggcgcattactcaaccaaaccactcggctgctgcaatatgagctcgtacctctcatccttgaccacgtcttcggccatctctggcctgggttcgcggctcaccaaccttcgccgtgccattactctaggcgacgagggagacgaccccgacaacgaagactgctcccacatctccaacgcccttcgagcctactacactgaaaagggccgtccattcccaccatggctcccacaagatcccaagggcccagctccggcaccctcgcgcgcgattgcgacttcacagctaccctccggcggctacaaccaagggtcccccgccaaccccaactccggccggagcggtggtctaggtgacctatggggtgattctcccacatcacaagcatcaatcccacagacagctagtcttcgtcgcggacgtggtgcaccgccgctctcctcggccaacagcgcgccgccgggtccggccatcacactttcccagtacgattcgcctggatcgggtccatctggagcgcggccattgcctagccaacgagccgggtcgcatcagcctgttcagaatcgtccgaatctcgaccgtgctgggtcgggtggtggttcagcccaggagcgactgcgggccagattacagggaggaaggtctcctagtcccaatattgacccgagtattcggaagccagttggagcgtctgggaaacggtgagagtgctgaggcttacattgcatagtggagagcatggcgtcgaggagttattttccaatgtttaccgaatgtttaccgagtacatatctcaagaacaaatctcattcaacgatagtcatatggttccaacggagtagatctttaccggatacattcgtatgttttgagaattcgcgctagtttgactttcccccacgcttcgggggcatattaggctgagttcttcagacgggcagagatcaccccaccgtcatccaacgagctaagatatgcaatcaacccagaattgcttagcagcagccaccaatatcaagccacagccaatgaatggctatctcggcctgcgatggggaaaatcccgcattttaccccgacgtcgtcatcccgtgtttggagggccgtgttgctccagcaagggaacataacgcaattcggaaggtagtttcctttctctcttcaaaaagttgatgggcccaagcctagatatcaactcgactaaagaaatcatgagataccccagtttccccgaaatgtcgccgacggcagtcctctccacggggaccccaggccagttgaataccgagtcatgcaacatagagtcttttcagtccctggattatctccgaggtgtggcttttgtcatatgaaattccttttcgtttgtcgctaggtaataccttcggcttctagtgtcggaattgtcttcttccgcaggactccctccgtccaattatacgtctataccgtgatatatgccaacaaaacgggaagccgggaagaatccagaagtgccagaccacgtttgaaagtgtgtctgaggactaattccgagtattggctgttgtgtggcctggaatggtcgacataagctttgatggcaaacgattcgtccacaatcccgatggcttgattccctgtcactccaatccctgctgtacacctatagtacactgcgtattccaggtttagtcctgtttttaccttccggtgagaccgcattttcgttcttccccttctcctcaacctccccggactggtcctggatctccacttctctcacatgggtaagtaccgagtgtatactccaggccgagcctataggacttggccaatttctacaacataacgcgtccctgagcggttttttgactttgcttttttgccgaacccccacacggagcctttgtcgtgcgtcataccaaccgtcgctatagcccatctgcacggcctcaaatagtcctttctcctcttccaatggctagtgtcattgcttgttccatacttctctccattccctattagtcctggtccctgctccggtagagcctggagtgacagttccactccactattatacatatcctttagtagacccccaactcatatcctgaggtctcgttcatcatggccgacctcaaagatgtcgaggcacctcagaacacgcacagcgaagacaaggacgccgtcgcctttgagatggacgatgtggcggaccaaaagctccaaaacgggctgagcgaagccgccatggatgcggaactgcagcagctggaagagcaggtgcacattatccccaaatcccgcctcgatataaccatgtccaatcctgctgcctttacctacgtcctcgtcgccttcgcgtccatgggaggtatgctatctggtcttgaccagtcgcttatcagtggcgcaaacctctacctccccgttgatctaggtctgtctgcagcagataacagtctagtcaacgcgggcatgccactcggagccgttaccggtgctcttctcctttctccagcaaacgagtacctcggtcgtcgtatggctatcattgtctcctgtattctgtacacaatcggtgccgccctggaggctggcgctataaacttcggaatggtgttcgcaggccgattcattcttggcgctggtgtcggtttggagggtggtactgtcccagtctatgtcgcagagtgtggtatgttttccatcactccccatcctatctgtatacccagttctaaccccactctttaatagttccccgcagactccgcggtaacctcgtatccttgtaccaactaaacatcgccctgggtgaagtcctcggctacgccgtcgctgcaatgttcgttagcgtcgaaggaaactggcgttacatcctaggctcctcgctggtcttctcaacaatccttttcgtgggtatgctcttcctgccagagagtccccgattcctaatgcacaagggacgcgaggtcgaagcgtacgcagtatggaagaagatccgtggattcaacgacctcgaagccaaagacgagttcctcggaatgcgacaagccgtcacagccgaaagcgaggaacaagcccagtcgaagaactacccctggatggacttctttactgtacctcgcgcacgccgcgccatggtctacgccaatatcatgatcttcctaggacagttcacaggcgtcaacgcagtgatgtactacatgtcgacgctgatgcaggccatcggcttcggcgacaaggacgccgtcttcatgtctcttgtcggcggtggggcattgctgatcggcaccatcccggccgtgctatacatggagcgatttggtcgtcggtactgggcgaatgtgatgctgccgggtttcttcattggtcttctgctcgtcggtgttggctacactatcgatgctgataagtaccccgccgcggcacagggcatttacttcacaggtattgtgctgtacatgggtttcttcggctcgtacgcttgtttgacgtgggtcgtgccttccgaggtcttccctacatatctgcgctcgtatggaatgacgacggccgacgctaatttgttcctgtgctcgtttatcgttacgtacaacttcacgcgcatgatggagtctatgcagcggattggtctgacgcttggtttctacggtggtattgccatcctcggctgggcttatcagattatcttcatgccggagactaagaacaaaacccttgaggagatcgaggagattttctcgctccctactgctgttattgttaagcggaacttgaagcagacggcgcaggttattcgggacttgtcgcgcttccgtcttaagaaagtgttttctcctgagccgtacaactaggctagtaatgcatatttgttggcaagattgaataatgagaaatggaattggtttttgttcatacaaagtttgccattgattgcatagttaatggttccattttctatcatggctgagtagatataggcaaagctgactatttgtatctctctcgacgtgctaccaggatactcgaggaaaggtgtcatggaatgccctcttgggtccaaggatgaggaagtttgtcgacactccgctgggtagaatcgtgagatatatacataaatgtccggaacgcggagcgactaaaattttccgcagcgccgatacatttacacagatacgattcctaggcaaaataccaaaattctcccaattgaatgccgattttgcgattggcaacaacgaatgaatgaatgacccatggcagctacgggtgggaagaaatgcaagagaaattaaaaaaatttaaatgagctctgagggtttgtggagctggtgggtatgtcattgtggtgtttgggagcacggacttcaggctttggtgtaacgagtattggttgaggagagaaagagaacatcggaaaggagttttgcatgtcaaagaccaaattgaaagtgagacatgatgatatggtggccgaggcatgttcttgtccacgatggcagttactatatacaatgtaattagattgcattgaaatgaaataaaatgaaccaatgattttacggtaccccatctggacacgcccgagaagtataaatcttattgcgatgttgtatattcaatcaagtcaaagggatccttcggtatagcgccttgcaactcccgatgcggtaagagtccggcccaactccatgccattttattaagatacccttttgaaagagcgcatcttttgggcaaaaacaactgcgtgaccataaatatttgctaacaattaaaacggggaaattatcaatttaatttgataaaaaaaaaacaatgggacgagccgggatcgaaccagcgaccttgcgaacttcagtcgcacgctctcccaactgagctatcgtcccatttaggatgatgatcgaggaatagttatgcatcatgaacagagtatagctccccaggtagcccgtttttgtctccgccttcttcactcatttctctagatcctaaccatagtcctacgtttgtatgactcctatcataatgaataattttccacatgtttctaggacttgtatatgtaagcaattatcagttcataactatagatcagcttaaaataacaagtacataattatgtactgtcgtctcacaacctgaaatatggtatccgtattctaccagtgcagtcagtgccaacttatattatctaattaagcctaaatttttatcccaagtggttatttctgcatgagctcgtgtaggaatattgctggtgttgaaagcaccaactgcatatatataacagtttctttcctacgtctttctatggttctcaggccttaatacatacattgcatcgcttagtagattgagttactacgttaatatcttccggtagtattcaaagatattaggatgcacctataataggcactcgtgtactgcgagatggttatccattgcattcgtagatgccgtttagaaccctaggaaagcgaccatcctgtattatttaatcatggtatcaacctggtgatcttcttctatcccgaatgggacgatagctcagttgggagagcgtgcgactgaagttcgcaaggtcgctggttcgatcccggctcgtcccattagtttttgcttgtttttgtcttctattgccttctctatgtcgatggatggcttacgtctcgaataacaaggtcgagcggagacgggtagacatgcttactttaagattttaccgcggctacctcctgcttaagtgctattttcgaatctagtgaacatctctattattcgcaaccactccagcctcgggatgatccctctagaacacatctaccccaagatggaaagtgagtataagtacaaatataacaagtataaacataagcgtacagtaggccaacaaaccgccaacaaaacatgagtatgtcgggtgtaacatcaatccctcaaggcttcaaagtccgcttggattgacgaacatataccgtcaactagtgacatttcctcctctactggcacacctaaggctccagcttgccaactcaccgtgcacaccaagcttgcccctttgacactgatgatgttgaaaacaagcggggcactagtaacatttccaggctgcgagaacaccatcttgacgaccttgcacttttggactgacccgtcactcgagttttcgaaggcaagtaaattgctcagctcgtacgaggagtcccgctgctgtccaagtttactcaatgtccaatttctgatgctgggaacgtatctcaataggccgattgcttgatcttgcagtctcgcaccgcacgcagcgaggtttttcgtcatcgagctcgcggctgcccacatctcctcggaaaaatgaggctccgttacattcggtgcccgtggatgtgcctcgtaataggcagaaacgaaaagaccccatgtgagaccaggcgtcccaatagacgctcgcatgtcaaccggcgtccccgagacaaaattggttacgccagggctaggaatggccctgcttagcgcccggacgatcatctggtgcatcgttgccgtgagcttggtgtcatgacttcttgaagtctgcagggccctttggaccagcggagccttaatctcgaggagtcttactctgctctggagagcggctgccggatcgaagaacatgggtgacccaatccaagtaccggcatctagagtgctggcagatgcgcggagcccaagaaaattggctataaacttcggcaagcaaactgcaatcaatggctcgaggagaaatttccaagatataggaagcctttcgggtgtgtcaaacggtgccggaagcgtttgacttggcagagtcactaagaaagagggtttctcctccatgccagtagtctggcgccatgcatcgagaaaggcacgatggaatgcaaccccgaccatgccgtccccgagagcatgggagaacgcaaaggcgataaagcatcgcgtcgctgtggggtcttgcggcgataccaaagggaggaccacgattcgccaaggtgggataccagcaggccatgggcggtcaaggatggctggtaagatcttttgaattgttgccgtatcgccattggtcctggcttcgtcttcgtgaattatagacaagtgatcgtgcagatcaatactagaaaccgcttcgtatgttggcttgtccgtctgcttcgccttgatgaccacgcttaggtatgggaatttctcgatgcagtgtctcaaaggtgcaataaatgactgagcggagtggacatctatattttcactcgcaatttcatagattgctcctatgacgagcgcgttgtagaagccgacatcttcgcgactaattgtacgacattcattgggacctgtgttccggttagcgctacggatatagctcaagaagtatatttcactaacttgcaagtctcatgaacgttgtggggagcgacattttcgtacaacgtggtaaacgtatctcccccgtaggctcaggctccagtgatgtgaatttataggatacgatttagcgtgcctatttgagtttagcgtggtcctgccattagcgttaccaggataggaacaagtagaagttcgtagagcgactacaaaactaatcggtatatcaaagcaaaagagtgcttccaaggttcaaatctattattcatgcagagtaacggatgaggcccggaagatgcataaataagttgctaaattaggcaatgagtgtcacccgcaattgtcacaatccttaagtaatggtgtttttatatatgaatcgaggtctttcgcaaactggagtggctaggacagcttggggtttcttgtaataactgtataaaatttcgttcgagctatagaatcatctaggcaacactatcattgtagacctaggacaaatgatctctgctagcaatcttgatccagaaatcatgatgcaccaacaaggctaaattctcctgtttccaaactggccttgttccgttgttgatcttgggtcggaacagacggaagaactaccagctagtcagcgagaatgaatagtgaccttcaagaaaaagaaacatacctgagccaagagcttatacgtctccaaaagtgcaatatttttgcctaaacagatgcgagtgccatatccccacgtgagaatacacttgtccatcaaggcagcccgatctggatcctccaaccagcgctcggggcggaattcatgagcatcctcgccaaagatccgccgattccgatggacaacgtatggattggcaccaatctccgttccagctgggataaattggttatgaagtgtcatgcctccttcagagacgtagcggggaatgatcatcggggtggagggctgatagcgcattgtctctttgtaacaggccgagaagtagggcatatctttgatctcatcgtagagcggaaccggatggctgagaagtcctcgccgatcataatcgtcaatctcggcgaccaacttctcatggacgcctggagtttggagcacgtatcgtagaaatccgcagaagaatgcggctgttgtatcagatgccgccaccattaacacaaaacattcggttttgacttcgtccagcgtaattgtagacccatcggggttctttgcgtttaggatattgtctaggaagtcaccctgctgtcgttgtttgggatttttcaatcgctcttcaaggagccgatcgcgaaactagtcaattattagcgttatactacctttgactgaatgccaaggtactgagaggtgtataaataccgccatgatctttcctgttcctgacccatctccgggcttgggcatgaaataccgtctcgtgatggggttctccaaaaatggccgagctagccatggcaaagccccaacaattgcagcaaaaggggccattttatggaagttttcaatcaagttctccacatcacggccttgagtgatgaatccaatcggttcaccaaaggaaagctggcagatcatgtcgtaggcaaaccatctgtccgaatcagcttcttgctcactattcatatctcatatggcggagtttactaactgcgaccaagcagcaaaatccatttcttgaccagtgtgggcaaacctctcagtcaacacgttcgtccattggaaaatgcgctcatcaacctgaccctcgagtgatttcaagttcgtcaacgtaaacgaagcagtcactctcttgcgcttcatagcatgctcatcatgcttaagcgtctggaaaggcggcgcgatttctcctaaaaccccaactgtatacacatcagttttatctactcggcgatgataaatctggggcaaaaacataggatcatccacggccaatagattcggtgcggcccgcacgatagatccgtatttttcatgatactcaatgcctatcgtatgcgcttgtttggtgtgtaggatccatagtttgaagaagtcggagatggaggcccagaaggggccagggaatccgcgtaggggatggaagtagcggttgtagatgccccggtagaggatgtaggttgcgagcgcaacgacgccgagaaggtataaatgcattttggttgattaaataaatgcgcaattcgtatagtttcgagaaatgctgggtgttttatcagtcattttctgacctaacttgcatatactacgtatgacaggctgatggtcagaaatcagaccgccgttcattggctgagtgagatcatttgaaacgtcaaggagactagaagatgatggttgaattaatctcgaggcgctgcttcaatgttcttagatctctgcgcctaatttcgattatgaatgccaacttttgtaatcgtcgaggctctcccccttaaattgagatacttgatggaaatgggatatcacaaagtaatgatcaattctaatgaaaatggatgaagaagaggaactgtccgaggagaaaccaagtaagtacctacacctggtgggggaaagccttgtacatgacaatcaatgtgttctgggtttaatataggaaatgacgtaaacagaagtgagaactgcattctttgctaagtcctgtgaatagtggatggcagaggtgacctcagtttgtattaattctagtcagagggtttttgtttgagaattgtgatactaaaaatactacatggcagatttaaaggctaaaaaagaccaatatgacaatgacaaggtttatgattgaggctttaggtaactctaatagcagaaaagacgaagacaaacaaattatagagtcagtttgctctccacagcatcggataggatctgcagcgacgaggtctgattcaaaacatccaagaaaggaatatcaaccttgaaaacggtgtagaaccacgaccggaactccgaggcaatcatactgtccattccgtaggaggtgattggcttgctcgagtcgatcttatccaatcccatgagcagcaggttcgagaagcgcttcctgacaagaagaagaattgcttcgttgagggtggacgcggatgcaatttcgctgttggttgagaccatggtcttgaggacaacggnnnnnnnnnnnnnnnnnnnnnnnnnnnnnnnnnnnnnnnnnnnnnnnnnnnnnnnnnnnnnnnnnnnnnnnnnnnnnnnnnnnnnnnnnnnnnnnnnnnnnnnnnnnnnnnnnnnnnnnnnnnnnnnnnnnnnnnnnnnnnnnnnnnnggccgagggtgtggggggggggggcggggatccccgcggcccaggggagggcagatacagaggtagcggaggatgacacagcagaatcctgagaagcaggtgaatcgagcgatgcagatagaagaacggctctgggatcttgcattgtgccgttgctgacgtcaaatccttgatcgagcagtttgcggatggcctgcggctccagtcccgtgaggatgtgcgaggcagaaagacggtcatactcgagacctggggccagtgactttggtccatcagccgaagtgtgggcgagtgcgaggtcgacgacctggatcagctcagcttcgttgagaggctggatacccttccggaggaggagcgcctcgatttccgggttttcatgaagataacccacctccgagatcattccgagaccgatggagacgatgggctttccgacgctgcgacggtatcttgcgaaagcgtcaaggaagccgttggcagagcagtagttggattcggtggctgtaccaacactgcccgagaccgaagaggtcaggaggaagaagtccagttcgctgtcaccgtgagcttctaaagcatggtgcaggttccaggttccttgccatttgggctggatacccgtatgccaagccttatgggtcatggtggaaaagagggcctcactgagacccattgcggcttgaatcacaccgccaatgggcttgatgcaagcggcgacggcggcatcggcatcggaggcattgacgatgtctccgcgaacaactttgacaacagcaccagaggcctcaaggttagacaccagctcacgggctgcaggcttgtcacagccagagcgaccgaggaaagtgaaatgacgagcgccgcgatcgaacatccagcggctgagactgcgacctagaccaccgagacaaccaatgaggaggtaagacttgtttgggtcaaaggtggtgagatggcgcgcatgggcaacttggatgagactggatgggttctccaacgagatcacgaccttaccaatacggcccttggtagagaagaagcggtatgcttgagcgatatcactaacatcgaaggtggaaatgggaactggcttgacagtgccagctcggtacagctccaaagcctcggcaaatttactagaagaatattagttggtgttgtaaaaaaagaatggagaggaaatattacgtgatccaaatgttgcggtagtgttcatcttcgtggtagaagagctccgtcagatcaaaggcagtgaaggtcacgttacgcaagaacatgcgcatatccaactgtccggcatcgataatgtcgcgcttgccaacctccacaaagcggccaaagttggcacaacattgccaagtggcatgcagcagatcgcctgtcagggaattgacgacgacatcaacaccccgaccgttggtggcggctagaataccggcaacaaacgaatcattccgggagttgaagatattctcacgaggaaccccaagttcgttgacaagataatctttcttttcatctgtgctgacggtggtatacacggtcgctccgcgttgaagagcgatcgcaatagtggcggttccaaaggcaccggcaccggaatgcacgagaatagtttcgccggagcgcaggtgagcacgatcatccagggcatatagagcagttccatagataacaggcagggtgggcatcacttcaaagctctcgtggggcagcatcttgagacaagcccaggccgggacccgctcgatggtgctgaagctatttggtgccaggacaacaacgcgatcaccagcaacgagattggagacatctgaagcaacgccacggacgattccactgaactcaatggcagccgtgcccttgcgggtttcgatcttgccagacagcgtgtagatgtctttggcgttgagactaacagccttgacttctatttcaacctgaccagatggaatctcggtggggggattggccagacgttggaaataaattgagtcagtaatgccaacacgcttgatggcaagctgagcaggggacgcttcggccagagtcatggtgtcgacctcgtcagttctgcgcttgctgaacagatcattgagtgtggtatcgggcaggaatcggctcacgtggaggagaccattgtgccagacaaactccttgtcatcggccgtgtcctcgaccgtgagtatgtgctcgactttcgtgcaaatggcatcgcgaccggtgccgctggggtgctttccaacgtccagaaccacaaagcgcagagctggttgttcgagcatcagggcacgcgagagaccgctagacagagagagatcaggagcatcaccagtcacagtggaggcgcccgtcagccaaatgagctctgcagcgttgtccgtgacgatcttgaaacgcatcatctcctctggtgtcatggttgggatgaagggggtctccatctccagtagggagatgacagtcgactgcgagatcatctcctcagtcacttcatcaaggcgtgcagaggagatgtcctccgcgacaaagaactggtggagagcattcgccatcttcgacggttgatcatgaagcaggaccacgcggcggttccatttgcgctgtggctgagaagaaagaacaagagtgattccaaagggtagattgaatacagtgcatccagactgaaccagaatgtcagacgggacactctctgttcgggcaacaatgatgccattcacatcgagcagactcagaaactggtccaccttcttcaacgacttggggtatgtgctatgaggaagcaaaacaacgtcgtacttctcctcgatctcctcgatcttctcgctctcggcggtcttccattctcggatgcgagggaaatcggtcttctcatccaaaaactcccgccatccctgggtcttgcagtcgcatcccttgccgagctccaacacgcgcagtcgaggattcttgtgcgcagccagatccaacaaggcggaaacaacaccaaccttgccattgtccgccaaatcggggtggttgacaagaaaatcggtgatgacctcttgcagatgaggttgatcagcggttgtcagtcggctaaggtctggcttccagaccactcgcaagcatgggtgacggcctgtgtcggagtcttgttcagccttgccggtgtacagagacaggcgaacaccgcgcatgttgatcacagaagacccagagccatcttgcaatgaggcatcaatcgacttggttccaaacccggtgctctgagacagagaatggatagatccggatgaattaacactctctgtgctgggagtgttaatctcgcacaggtcgaggaagacgggtagatgggcgcgaagtcggttgaggttaccggccgtgccacccattatggcggcctgcaaacaggcatcgatggtcaatgggtgaacagtgtagtaatcgccttgatacgatgttcgggcgacacgttgcttgataaccgtttcagagacggcagctgggttgattctcttcttgtctgtcttcatcgacaccagagattggaatgtgggaccaaagacaagcccttcctcggccagcttggagtaccatgggcccattgaccattgctcatattgggcggtatcgactgtgatagccggcaaggactttcggtcgagtcttatgcagcctgtgcaatgtgagactgcggctccagcctgccacgatgagatagcaaagtcataccaagtgctggaggtggatgccttggaaatgcgagctggggagacggttgtgtataaatcagcctgttgatgttcatcggcgtgtacgatcaatgcggaggcgatgttgacgttgcgcaaaacaaatgatgagtcagcctcggcaaggttcttgatctgtgaaatggcctcaatcgccatggaaatgtatccagcagctgggaagacaacctggctctcaagcttatggtcattcagccagggcacctcgttcagtcgcacagtattcttccagactcggtcaacaccgttaccagcggccatttctgatcctagcaattcatgacgcgggtaggggcgactgcgaagatcactactcagtcgtgactctctccacagcagctggctgtagctccagtggtaagtaggaagatcgggaataaccttggccatggcagaagaagtatcgttgacggccatgatgttgatatcatgtccacggatgtaaagttctccagcgagggtctttaggcagatatcggcgtctttaccacggacaagggtagcgctgtatggcgcatcgtcgatagaatattgcaataatgttcgaatctgcttgacgggcaattgtagggctgaatggggtccaatctcaatgagatggcatttgcccttctccaggattctggtaacggctgccgaaaactgcacggagttctcgagattctggcgccaatagctgtgaggcaatactgctgttgtcttacggctgtaccagttgggcccgtctacacccacactcgaaaagaactggatgtctttgtcgatataattggcgggaagagttggccatgcctgctcaataaggcgttcatactcttcaccaatctccttcatcatataagagtgataagccttgccacctgtctgtagtttgcgggcgaattttcctgcctgggaggctgtctgcaagagggtttccacaccggagacgctaccagagattgtcacactctcaggggaattgacacatgcaacaaccacttccttttcgagagaaagctctgaaatcaactctttggcctcttctgcgctaccgccaagtgccatcatggatccttgagatttgagctggccgacaacatgtccccggtaataggcaatcatgatcgcctgggcttcactcaacaatccagcggcgtatgctgcagcaatttctccagaggaatgaccggccaccatttgaggagcgacgccccagctgttaagtaggttgacgagaccgatttgcactgcagtacacagaggctgagagaatctcgcatcgccgacgcgactggtagcagcgggctccattaaaacatccttgatcgaccatgcgggtgcctcaggcagcgtctgcagcacattatcgaggtggtcgatggtgtcccggtaaatcgggctctgctcgaacagttgacggcccatctccgcccattgagcaccctggccggtgaaaaggaaggcgatgtccaatgccggaagggttttagtgaccaatccctcgacgacgagatcagttgttgcagtggcctgactggcaaagatataaccacgctgggacagcttcgatcgacggtttgcgagtgtatgggcgaggtccacaaagtcatagtgggcgccgttgcggatgctatagctgagatcggtgatccgggcctccaaagcttcaacggtagaggcagacagagctagaaggtatttcttctctgcaggttggttatgtgtgattgccttgggaatcttgttgactgaggccaaatactgaatcggatcttccagaatctaccacggttagtatcgcagtattttggattggagagcaaatcactcactgcatgggcatttgcaccgccataaccaaacgagttaatgctgacacggcgcatggcagatggccagttggtaagtttggtcacgatttccatgttccaatccgccaatttgactgtctggttagcatcatgactctcattaaactcggatacaggactcacgcttggggttcaacttggtcacgccaactgtggcagggatagcctggtgctcgaaggtgaggattgccttgattacagcagtgattccactggctgcctcactgtgtccgacatttgttttgttctaggtttcattgttcagcagaccgcgcatttatggttgagttgaaatactcacagcaccaattagcaaaggagatcttcccttgcgcttgaagacccggctcagagcttcaacttccatggggtcaccgacggcagtaccagtaccgtgacattcgacgtagtcagtgtcttctacgaagagtccagccatgcggtaggccttgcggatgacttctgcctgtcctgaaatgctgggctgagtgataccggaggttttaccatttctagaacagttagtatgcttagacgcatctggatcgagaatacatacgcattgacggcgctgccacgaatcaccgcgcggattgggtcgccatctcgcagagcagcagacagccgcttgatatacaaagcgctgacaccctcagcacgaccgtagccatcggcactcgcatcgaaggtgtggcaagtcgaggttggggagagaacgcctcccttcatggttccgagatgctgctccgggcccatgatcaagttggcaccggccaccacagcgccttcgcattccccagccttgatggcgttgacggcgttgtggagacaataaattgatgatgaacaagctgtgtcgacagtgaaactattgatcttgtcagattgaaagaaaagtccattgatagctaatgaccacatacctaggaccgcgaaggtcaaagatgtagctcagacggttggagagaattgcagtaccggaaccagtggcactgtatcggtgcagcgactccggatctctggcctgcatggtctgaaagtccacggtgaaattaccgacatagacaccaatgtctgcgccggcaacctgcttgagggaaacaccagcactttcaaagcattcataaacaacctcgagcagcttgcgctgctgagggtccatgtatgtggcttcaagattgttgatcccaaagaaggagttttcaaattgacgtacatcctccttcaagaaatagccgcccttggtattcatcacaccggcacgatcgccttcggggtggaagaatccgtcggcattgaaacgttccttcggaatttcgcattgaccagttcgctcattgacgagcatctcccagaagtcattgggggaggagacgccaccgggaagtcggcaagctttatcggttagctctatggactcgagaagatggagtaatacttacccattccgacaatcacaatggggtcattggttggctcgggtccattggaaagagtagcctcgagagaagaaacgtcgatagaacccatttcgtcggtgtaaacgtagaatagaattgtggttgggaatggaattgtcaaattcttgaggattcggaataaacttgcacttttcaaactgtgtatatatatcccctgtactattctatataatctctaaatgtatacagcaaggatctgaccaagggtgcagtgacaaagtgacaaggctcacgatctcaccgtcagacgtcaggcttatacgcggtcagatcggtcagatcgacctatactttaaccctcccacagggcaattaagcatcggcaaaaccaaaatgaagtccgttttaattacagggtcagttttgttttgtttgttggatctcccaatattgacgaacgattcagttgtggaaagggaggcatcggcgaggccttggctcttcagtatcgcgctcgaggtacaactcacattcattattcatgtgcaactcattaaaccaatcaggttgcactgttctggccactgttctgccctgggaatctagagagcatctttcttcggttggcatcgcttgttttgagttagatgtgacgaaagatgactccgtccgagccttgcgcaaagcagtcgaggagaagattggagatcgactcgatattcttgtgaacaatgcgtaagttttcgtgacaatcaatcttcgatttggtttatttcaatttaacaatatatagtgggatctgtaagcttctgttgatgcagtacaggatgaaataatactaagaagcaggctatacaatgaccgccatcgacaccgatgttaaacaagtacaacagatgtttgacgtcaatctctttggaccaattcgaatggtaaatatcttccaccccttgctaattctagccaaagggtgtgtcgtcaatattggctctgtcggaggggttgtaccctacatgtatggctgtatgtctatctgaaatatgggttcggctgaaatccacaactgactgcaatgtagcttcatacaacgctagtaaagctgcactacatcactggggaaatacactccgagtggagatgagcccattggggtctgtcaattatccacctctctaccttttcgctcgctaatcgttcgaacagcgtccgagtcatcaatgtaatatctcaagtcagtataatatatgagtttggagactaacaacgcatctagattatatctggcaatattggcaccaatatccttgaccgtgattcatcgcgtactctccctccaggtacgtcggcaacccctgcagtttggctcccaaattgtcaactaatgaaatatgtagactcgttctacgctcctctgcaaacggagttccaagctcatgtccaacgagtgcccggtaagctgaaatattgaatattgttcgtgcaaggtaggctgatcaacagatacaaccgatcgcatggtgtatgccaaatcggtggtgcagcagtcactaagagcatgtccacccgcctggcactgggtaggcaatacctcgacccttgtgtggtttatggatatcttcgcgtttcgcactatctgggtaggtttttactcttcgattttggacacatggcatccactaataataacaggactacgtgctatggcctgtctttagtctggggaaattaaagcgcgcgatgaaatccaggtctatctagataaccaatcgacaattactgtctttcaataagattactagtcagcttccaaaatttagttgaactgcggcgagcgagcatttcgattccagggcacatccattgtagtgtttctgctggtttagcttaattccttacataaaaatagggtaatactcaggtataagatatgctttattcaaaatcgaaaatattataatgttatcacttttctggatcgaaataatccatgagtgttttgtttatattattgtataactctgagcatctagtctatgtaaatcataaagccgagattctgttaatatggccattagaatgtatgacgtccaatctagattgagtctgtgcttctgtgtcattcaaaatcccaggtctgacgatctgacactgtttctgacagtctgacatgcaggatgtcactacttttgaaatatataaaaccgatcaaatccatcgctacctaggtaacatcgagttcaaacagctatctccttttaacattcccatcaccatgtctcaaacttccgggtttcccagtcttcgccccgcctatattctcaaggtgtgttatcaaatgcaaaagcatctcacttgactaataaagagatagctgcaagtaggagagggccagcctgttggtatgaaaatactattgtgtacattacatcgcctcggtctaatcattttctgtaggcgcaacatcttcagggtcgacctttgtccactatgtgagtttccagtctcaatctaccagatgaactgattcctaacttttgttcagagcaccccaggcggaagcatctccactgtagagggattttcacctagcatcgatgccgaggttgtatttgctggcgactggttgtatttcgatcccgatcagcaacatagtcggatgaatgtcaagggtgttgcaaggtgggtttatatctcacgtgcttaattatatgaatcccactgacaaatcaatcagaaccactgaaggcgaagtgagcaccgtcaatatcagcaagaaaacatagaactaatgaactggcagggcatcaacttcgcctattcgggcgtttccggagtttcgcccgacttgggagccattttccaaggacaaccgaagactattccattcggattatccagttagttctttgacataaatctgtatgatataatacgctaacacattatctagccatgaatcccacttttgaggttggtcatccccgtctcaaggacctcgagaacaacacttgggttggcaatggccgattttcgttggagggagacaagttatacgtggaggtccgcatctcgcaggttgtttccagcaaggatatggattagatggactctttgtgttgatagtagcatcaaatcagctcctaaacttgccaattgacccatcaatatatatctttaacgaacaacacatacaaaatcaaataaatcaaacccgcgaaggggcagattggccaaaggtcagatgcctgattttgcagggttgatgcctcaattcgcctgaattatgccttatcttagactgtcaggaatcacaggatagagggctcagcaaagtattcaaaaacaatgaaggtattcccatataaatctccgtatgcatctatttctaggcgctgaagctgcgaccgtacaactaatttatgaggtgggaatagcttcaattcaatggtttatatagtcggggatggttctcaacgctagggattcgaagaaactgatattttgtatggtgggaatagcttcaatttacagttcacgggatagagcggtgtcaaaagcggtctataattcaggcatattcaggcatcaaccctgcaaaatcaggcatttgacctttgaccgccctgccccttcgcagatcataacaaaaaccaggcctagggggaccatatcccggtctgacacaatcgagtaaaaatgaataacatttgagtatgacggataagttactctaatgaccacgactcatcccgaattcgcatgaatggcgccatatcaacatcttgaccctgttccctcttcagctccaacgcagtccgtccgtccccaagatacgaccacatattttcatccaggtatttgatctcgtaatcctcaaaacgaggtgtcttgagcgtcttgagcatatgaagcatacttccagaccacagctgaattcggttgttatacttcatccatgattcacatgattcagcccatactgaatgcccatcgtgccaagtgtctacatggcgccgccattgtgtcgttacgctttgcttgggagtcaaagagtgcaaattctcgttgctgatcttggcagcgcactgaagcgcatattcgacttgggcttcgtgctgttggatttagagggtcagctaagcatttcaccagagtcgagctcgagagggattcatacagtaatcaaaacggaaccctgggcccagtttcccgttggtccaccaatgaagaaaaagttggggaagtttggtgtgctcatgctgagatagatgttgggggacttttccagttagccttcctttctctattctctatatctgtaggtggggtattacttttgcccattcttcgcgcatagtttgtccattcttgccggtcacggtactggatatgttagagtcatatgccatactcagtggaaacaaaagaaactcacaagtgaggtgcgaaagcaacatcaaaaccagtggcacagatgatcaagtcgaattcgtgctcaactccttcttttgtttcgattcccttttcagtaaaccgcgtgattccactcgtgatgactcggacgtcttgatagtcagccttttgcaaaacgacccacacattcaagaaatgaacttactgtcttctgtcaatgcttccaagaagccatcgccgggctgctatgtcagcgcacctactttcagaagatatttgtaagaacttacagtaggcctacgacatccaggcgaaaagtcaggcgtgaatagcttggccaggtcctgccggtctggtccaacacgtgccttaatcatctgggaaatcatctcggtcgtcatatcatgcatgggatgatcacgcaggaagattgggaatcgctcttgcatgactccatcgacagatttgcgatattgcaaaaagcgagcaggatcgttacggaatacttctttctcagcctcggtatagaaatggcttccagccggtgcgggcggagctgacttctcaggttcatcgggaaacaagcgcagatcttggaatgccgctgggggaacaatccattgcgtagaacgtacaaacactgacagtgatttgacgtctaacggtgggagtcagcagaaggttatatcagaggggggccataggagcatacccttgacaatttgaggaatgatttgaatcccagatgaaccagttccaatgactgctactcgcttatccttccagtcaatagaggagttccagttggctgtgtgcgtaaggatgccacgatagttgccgatgccgtcaattttaggccctagaaggattagcaccagatcatagatgcagtcaaaacatgagcatacatttccatttattcaatggcccagaaccattcactagaacatggcatcgatccgtaaagcgagagccgtctttgcgctgcagctctagttgccctacatcaattagttatccgtgattatatttgatggtaggaagacaaacattcgccatcatcttcgcaccaagtagcctcgactacctccgtttcaaatcgaataaaattgtatagactatacttcttggcaaagttgacaaaatattgctggatttccggtcctctggcataatatccactccactccggattgggttcgaaggtgaaggcatatgaatgagccggaacatcacaacccactcctggatatctaatacattgattatttgaattaacacttgtttaatagagtttgtttaacggggggaaaagaggggaaaataaaacgtacttgttttcaaaccaggttcctcctacttcggtgtttctacaaaagcgtcaatagtagatacatcaagtctagcaaggcggttccttacttttcgtagacagtcagttcatagttggatagcatattctttgccttgtaagccatcatcaaaccagctgcaccagcgccaacgtggaccactttgagccgccgtggctccgagtggcttttttcgacatagttgttcgatgtagaacccatgatgaataattggctgatcaaaatttgcacacgctcgaccaaattatttatattaagccttttgggtcgatttctgactgtctgacacgaagcgtcatgcattctgacctgacatgcatctttagcgtctagccgaaattagctaactttccatgtggtcagatctcagcctccatcaaggaactcctgtttgcattgagatctccgatatgcaggtctccggatgaaaaccaatgaatgattgacatagggagaaggaaaaaagaagatgcagaaggtaagccaagctactgaaaatagttgctacacctaaagcggagtaaatggctcatttcctcaacagcttattgtcatctgtagatgagtatggaattaaaggggtcatgcctcgtaaagtgatggcacgattcagctgtcctgacaatttggcccccatcagtgtcaacctttgaaatataaataccatactgaatcatctcacattgaacaaacagaacatcatttgtaagattcaatctaagcactcaaaagttgaagcttggcgatcaacatgcatatgcaaggaaccatggctgcatctcccctgctcttcctgtttggggttctctccttcgtctatctagcagccgcttctaacatctcgtctctcgtgtctaccctttcttcctcctcccagatttactaccccagcgatgctgactgggctgacaccgtccagcgatggaccgcgtgggacgagcccaccttctctgtggccattaagcctgcctctgttgcggagctccagtctgttgtacgttttgcctctgtccttgttcttttccatatctgactatgaaataaaacaggtcaaatacgcttccaaatataatatcccttttttggccagtggtggaggccatggatatagtacctctttcggaggtcttcagaacggtttgaagattgacctaagcctgtttaacagcgtcagtatcgacaaatctgcaagcacaatgactatcggtggttctgttaagttctctcaagccatgggacctctcttcgaggctggaaaggagattcgtaagtatctagtccatgatatggggtgcggattcttctctctaacactttactaatagaaaccggctcttgtccttgtgtgggaatggtaggtgctactctcggcggtggtgttggcagataccaaggccttcacggtctcatactcgatgctttgaagtcggtccagctcgtcaccgctgctggcgatcttatcaccgtctctgccacgcagaacaaagaactattctggggccttcgtggcgctggatttaactatggaattgttacctcggctacatataacgtccacgatctcacaaacgaaggcaatgtgctcaacgccgactttatgttccctgctagcctcaacgaaacttatttcaacatcttggctagttatggaactttgcccgccggtctgtccttgtataccttggtcatgaatagtccttccgtgggagtaagttctttcaactcatatgctatcagcagcctggctcattttatttagcccgttatcctgctgaacgccgtctatcccggagctgagcaagaaggactcgatcttcttgcccccttcctcaacctgacctctattcaacgcaacatcaccatgattaagtgggatgccgtcgatgacgacgccggtttcggtctagccacggctttctgtgtcaatggtgaaaagcacgatatgtggtccctcggtgtacgctccatcgacgcagcaacacacatcgattacttcagcaagctcgttcagttctgggaagactatccctctgcgtcaggaaccacctggcaggtggagtatttccccatccaagctgtcactgctgttgcggatgcctccactgcctatccccatcgcgagatcagtgcccatgagtaagccttctctgtttcattatgtatccgtgtgattttggacacccatttaacacttgattagaatgttttcctttaacattaccgactcctccctcggcgataagatagacgactttgcccttgctgccctggagtctttcaacgcgaccagtggctttgatggtgatatgcacatctacgtcagctatgcccacggcaccgagggattggatcccatgtatggcgcggagaagctgcctacgttgctgaaactgaagaagaagtgggatcccaagggtttgttcagctataacaatgggttgcccaactgatgaacgttgtccttgataattagagttcatgttgtattctatattctaggatagtttgccagttaatgaaagatgttattatacgttctactgaccaaatttcctctctctgatcacctgatctgtcactatgaagctattcagagatcatcttatctgcctacggagtacaaagcaatctaaattaattctatcactaccaatcatagtataacctcattctaaagcggcacttaagtagtatagagtagggcttaccgaatgaattaaatatgaccagtaattcattctatttgtggcgcaaatatataaagaagctcaagtcagaatgaaaattctaccattgtactatcgttatgacaaattacgatcgcatttaatcaatcaaatactctatattatgtagccatttaatggcttttttagaattaaagtatgtctgttattggtggtggtagaataaatttacattgattgacagatcaggtgatcaggtgatctctgaatagcttcatattcacggattattaggtaatctcaatataaaatctttgaccctccaggttacaatttaaagatagatggtattcaattgcaacaaaaatgtattgttaaatgtactccttgcaaaatccccgaaatatattctaactaaagctaatttctcatcaactcggctaggttcaagatgttcatggtaaatttgggcgtgattctcatttcctaggtgtgcttcgactcatttttattgctcaatttacgtggaggtgcgtataaatatatcgttcccattcagtatcaagtatcaagtatgataggcagtacatccaaatcatgcacttcttccttcgtattccttctccaactcacccaaaaatccctcaatcttctttccctgaaccaggacctccttacagtcaagcaagacatacaacatccgcccagcctgtgtctctccagcagtgatattcttccacttgtgcgccgtcgcccgctgcacactaatgtcaccctgcttcattatgcgtgtctcgccggagtccagggtcaactcaaattcaccatccatcacaatgccataatcgatggacatggcccgatgcatgggcgactccactccaggaccaaaatcgatcatacgtacgaccgtgccgttggtgatgtggagaccgggctttgttttcgtcaggtctgcgttcatatgaagatgtgttaggcttgattaaactaacctcgttctccttggcatatttgatgtctttgtcctcgttgaggtcgacggggttctcatgggtggagtagataatattggcaacggcctggttctcacccatgacacggtggtggtcgccattgtcggtgacgaggaagtggcctttaccgtcttcttctttgttgccggtaatgagacgttgggtcgcgcgcagacctggggctgggaagccgtcggtgatgaagttgatggcggcagtggtagtcatgatgaatgtttgtgtaatgggatgtttgatgtgttgggtggatttaaaaagtaaggagatagcaatcttatatatttagaaatatatttctttatgatacttggtacctgaatctgacattatctgacattatctgacaatgacatcggggaacgcttaagcatgacttgtcagagtagttcccccatcaacaatccagctactacccgtgacataactcgctttggggctacataggaacaagatcaaatcagttatctcgtccacgtgtgcaatccttcccattggcacggcctttgcaatcagcgccttcaattccgaattcccttgcacggcgcggtccaccataggcgtatcaacccacgaggggcacaggcagttgacacggatattgtattgcgcattatccaatgcttttcttttgttagaaattttctctttctgtccatttaaatcatgtcagacgtaccggcgtttcgagtcaaaccaagaacggcatgtttagacgtggtatactgcgtcaataaaggcgtcgccacgaacgatgaacaagacgccatattgagaataacaccccgcgtagaaccccgatcgggatttttcgagctcacgggcttcagctgttgctctttcatggcgcgagacataaccttggtgagaaggaaagtccctttgacgttcacgtcgaggaagcggttaaattccggcagggatgcttcggcaatctccgctgcgacttggacaccaatctacatagaggcatcagaaaatcaagtagcaagaagatggagagaaagctcatactccagccgaattcaccatgtaatcaattcttccaaacgcctgcttcgtctctgctaccacggattccacctgctcctcattggtcacgtcgagggtcaatacgagtgctcgatatgcagggtgtgttgccaatttcttgctttcttcggctgccttctcagcgctctctcggttcaaatcggcaaagacaacgccagcagctccttcagaagcaaaggccaacgcgcaggcccggccaatcccgctccctgaaccagtaacgagagcaaatccgttgatgctcattgtgcttgtggaaataatgacaatagtgatattttagatgcggttatgctaaagttaaatatttccgttggaattggtggtatcagatgtttcaagtcagcctcaagccacctgcagtcagggtcagacggtaatatttctaattagttaactttcggaaaaaccgggaaattctatgtataatgcgtgtagttgatagagggagaaccatctactcggaacaagttggcttttggggtcgctcatgtccggaatagattatgatgtactttggttcaccctctacctccctttctttcccttccatttccaaatcaaccgatgaactatgccgtgtactttgctcccaagatgtaggcaactcatattcgatccgcacatttggctgtttagccaactcagccagtgccggattatgttgaatcaacatctccactagttcctgctggcttggccgaggcgcttcccgcacggccacgtggcagccacaattgctgcattctaccacatcttcttgggaagactgataaggactatcctcggttgtagtggttgtggtgcatttcttccatggacgaaataattgcttccgtgtcgtgccattgcttctagaagctcccatttcaaagccgcgggatagcattcgggtactccatttgactgggcagcctctggacgacatagattcgttagatgtatccaaggaagaagacaccgcgtagctggatcggggagtgtgtggcctggaattatcgatgtggattaaaacatttccatttttgaattccctgggatgcaaagacggaggagagaccaatgtgtccatatggagaatttccggatccaaggcgatctgatcatcatcagttgtaagatcaaatggtagagagtcgaagtcaaagtcgaagtcaaagtcgccgagttctgcatctgtcgtctgcgatggtgtagtaagtgacatctcgtccgggctccacggaatggtgccttcgaaaggcgagggagtattcacgtcgaaatttgccatgtcgaagtttgcctgccattcgaggtcgatgggaggatacaaagcgtccatgggatccggaaatgtttctccaattgagtttccagcggtatttgccgcagacaaatgagggctaccatctatggaaggcgttaaagccaggatgttgaaggggattggctggttttgcagcttcctcttcgcccctgtaattgagttagtggatggatacagtctggcccaggaaagagaaaaacatacgaagcttgcgttgtgagatacgattttggatgcgtttgcgcaaagctggctccgatatttgactccagtcctctttatcgatcattttatcaatttcatcagttgaagccattttagccattgttgagtgatagatgattgaaggtaatcaagatagtaatcaacgcgtgcgagaagtggatagaaataagacaatttttgaatagcattcccatttatacttcgtactggataagcattcttcagatagattatcgtgatcttgcaggagtataacctctgctgccgttccaacctacaacatgcctcgtgttttctacgagctaaacctcgacgggagcggatgtatgcagtcagcattgaaaaaagatgtcagcaatgatcaaaggtaccctgcaggagagacggtattattactgcattttttaatcattttaacaatagttacggttgttatgctactgtaatactctatttttatatagtattctagagtaagataccataaaatacccgcacccatagtggacaaatcatacaaaattaagtgtattgttacaatacaacggtaacatattcggtaaccgagctggacacgcaagaccctaaagcaccatagtaaatgtgataaatcacaacttgataactatctgtagtctataggaacttttacttctaggttgacgctattcaggtaatttataccatctttattggtttagacatatatccccagcttttggcaacggaattatcggtaatctttgaaatgaccataatacggcgtcctactttcttggtaactgacatatagtactaataagccttatcaatatctatcggcaaatagagaaataaattaaatatttggtttggttgttgggatactgaaacgctgaggtctctggacgatcgccgtcatgcatgaggcggcggacgaggctccacaacctcaccactcagcgagaggctatctggccggccccaaccaacgggaccctaccagagaatttactggtcgactacggagtactccgtacgatgtggtcaagctggagaaaccgggccggtggcaaatcggagttgagaattcacatcagccccgcggggtgccgtacgacatcccacccaacggaccgtcgggttggtccgatccgccatcaagagtcgggtacggattgcctcggacgaaactaatccgtggaggagatggagtctcagcaaacgaagtgaatcgaggcgccctgtggcctctttcgctccgtttggatgttgacagccggagaaggcagatatagatagtagctagtcctaaccttctctcttcatcaataaaattccgaattgacatcccacctactcccatccaactaatttcagtagctcggcaaccgtcagtcacaagtgtagaatatatcgcatttactatgatgtttaaggtgtccagctcgcttacgtgtatccatgctattggaatgcttttgttacgaataaaggccgagatgcttcttttgttattttatctgtactattagccgacatacggagtaacacgaggacagatccactagcaaaaattccccgatatccatctttccgcccccatacctttccaggtatatggtcgggatggtgagacgactaccccgtggcttttcgcttaatgtaacggttcaatttctaagcaagtcaaagcagatcgggatttccgataatcaagatgtatttttagtttatggaaaacggtccagccgggtcttgtggagagccatttctatgacttctgataaaatgaggggttggtactattaattcactcgaggaagcgcactagtagatcttgattcttcacgggttgtatatgatcaaataatcatttccatggagtgcttcgcatgaatcatgatttctcgcttccagttcatagtacccatgaatcaaacgtaccatgcgtacacggcacgtggcactatgcacccgcttcatccgaatccggtctagttatcatgtaagagaggctgagattggctatattcgtgatgataatgatagaaatgagcgcgaaaatggggcgagaacaatgcaaaaatgggttgaaacaagaattgaatatctattttggccaagtgctacaaaattggaagttgtatgagtgaattagcgttagttatttgtttgggggattttcgtagcgattgataattcaaccaaccgcttgtagatacttacaatttgtatgtaaatctctagcaaaattaagtcacttttatcatatcaactgctttatcatcagggggttagatcatgtaggaatcaggtagaatatcagattcttttgggatcaaaatgcatgtctttttactctgtaaaactagaagtgggcagaatatatggcagaaattatggcagaaattatggtggtacttaattaggaaggaggtactggaagttcaggcagaggggggggggtggatcttatccaagggggaaggtagcattatcaatccctttgttaatatagtaaaacgtcacatcatcactcaaaacgtcaaatcatataaaatcagtatgaaaaatactcctcccgcatggtagaaaacaccttccagatctgtgtcgagcaattcccccttaatcgtcgggcgatttcatctaccaatctgatgacgcgaccttccagaaaccattctcccctcagtggctgtagaaggatagcatagtatgacaatagcagtaaagcacccgggttgttctgtttcaatagggccaggtagtcaggcgaaacgcgcattggccatgaattaagagcatcccagatactcggcgaaggtccgcaagtcttgataaacgcaaaagcgactgccaatttgacagccgaatcgcggtatatagagcattcagcggagtcggattcacggtccggtatgacggagagtagagtaattagaagtaggtcgttggggtcggcagtgacgccgagatcctctcgccaaagggttgtaaaaggtgccaaggggccagtactgagttctgtccagacgggacagagcatggagcagccgttacgcagtatctcgatccagtttgatgacggcgcgtcttctgggttatcatcattgctaagaaacaatggttcgtcgttggattgggagcctagggtatagacgacgaggaagaatgcaaaagccaacacggcctggctattattactatccacgtgcatagttgcccatcggaatgcaggggctgcctgattttggtgtcggattgactggatcgtgtaatatactcgattgggtggatcgataaaagcaaggtggagggcggaacaggataggattccatgaagtaggaaggggaattgcgtgcctagctggggaacaatgattcgaaatgcatcatctgtctccgggccacatgtgaggattttgtaggtatggttctggtaatgatcgagtaatcctacgtcggttgtgatcaacggttgtaagggacatgattctccatgattcgatcttgaagctggagttgtcacagcctaaaggaataaatcagttggattgatagtggctggtggtcattatcttgacttacggtactcggtagcccatcggaactggcagatgatgacgacgagatcaacaacgctgggttggtaaagtagcggaaggcatttcctcgaaaaaagctctgtaatggcactgggtcccagaagcctccgttatcagaggctgcgatatggtgaacagtcatccagtgctgcttcatgcgcttggttgtaacacaaagatgagcacagcgagcaaaggaacaggctagcccattttgtatgggcagtaaaggcactgggaactgggtttcatcgggcaagacgacatcattaggttgggtcagttcaaatctagaggcgtattcgatgaatgctcgacgcgatgaatgatgaagatggtggatttccttaagatggcgagcgacagcaccaggctggatagcgtagctgcaacgccggcagatcaatactcgatatgtaggcagataatgtaatagctcgggtggagtgagcccatccactgattttaaagtcatggtgatgattgcctatgaagagaaacaatccgcaaagatattcttcgagtcatttcagggggccaaaatcataacgagttagcttctcgcgctgttccaaatgccaatgaatcacgatacgttgatctaggcgggattgggaatgttagtcatcatctgatcaggtggatccgtttacggcagcaagtgaatgcgacagctttctcatttagaagtataggagactacctaggtaagcacaaaagacaagaagaattgaccaaggacagcacattacgcatgattacacaaaagaatcaaaaaaagaacccaaacgtcttcacaagaatttaaatctgcgacaacaccttgtcaatgtcaaccacaggggccaactcggagattgtctccttccacacctgtgcctggatgattctgccagaatcactgtctccatatcctgcaaatggagcctgcttgttgtcactcaggtacttgccattagaggcatcgccagccaacaccgatgagtgaaccagggtacgagcgcccatggagacagagcgaccgataactctcttcatacctgcgagaactttcccaaaggcaccctcagccgtgcggtgcaactcagagccataacagaaaccagggttgaccaagttcagaatggcgcccgtggagcgcttggcgctggatcggttgcggaacagctcaaggaagaagagctggtagagcaacttggaggtatagtaacgatctcccatgtcgaaattggccttgtcatccaagacttggataaggggaagtccctgcttgatagatacctgagcctcggggaacttagcccaggcggctgtctcactgccgacgatggaaatcaccgggcgagcgcggttgaggttgttggcagcctgttgatcaagcacgggtaataatagcagcgtcaggagagccgtgcttagccaattgatttggatgcttgactcgtgagaggtgggttggttgatggtgaagttgaagttggcaacaccggcgttgagaagagcaaagtcgacctgaatgtcggacttcttgaggcgctcgacaaaggcgatagtactggcatagctgcctaagtccagctcccagacctcgaccacggggggcttgaccgaggcgggaagcgaggcgagaagggagtttcgggcagcttctcctttggagatgctacggacggccaaaatcaaatgggagagtccaaggccgagaaactgggcggaagcttgatagcccaggccagtattagagcctgtcacgatacctgccttaccgcgaagggaggtggtggatggggctttggaagggcagaccaagaactggcgatagaggaagcctgggtaagagttatagaaaggcattttgctgagaggttggaaggggaggaatatgatgagaattgaaattgaaaggcgtcgcaatgcagggtataaatactttcgtccttcattttctatgttgtgcttgcaacgttgtcctagatgcgtacatggatagatgtgggggcgaatcgacggtgccgttccacgctgtgattggtcaggaataatttacacagaacgggaggtgccgttcccaacttcgccatcagagcttgaaccccggagaagcatctgactactagtagtcagactgtcatgctgtcggaattaaggtactgacgggtttaatgggcttaatgggtttaaggtagatgagtctgactccccttctgacttttttggtggtttcaagtaaccgctcttacccactgattccgtgagagatttttgatttgcgagctttcgaaatggcagggatgtctccggtccatatacccatttgagcagaaatctaatcccgttgtccggccgggtacgcagacatacctctcagggttcagagcccctttgaggactgatgcgttcatgccctattttggaacggcaggaaaattgaatcatattgtatgttgtagttagttaccattacatatgctttaataatcaaagtatgcaatcagtaactaaagagaagtctgacctagcagacaagacaggtaatgagacaagacaagagtgacacagcaacaccaccatccaaggaggtcagctagtaagcgtagtcatacagaccatagcaatcatccttctatcctaatagaacatagtcctgtaaactccttttcattcccttttcattctgtgtgtcgtgtgtaggtattcctcctgtgcgctgagttctaactatctgatgattccgggtttccccattcggtactccgtattgctggcagaactacccgtaggcggtatggcacaaagcatgaaggcggtgtaaacttgcaaacgccaaccacctccaaaaacagagatgcaagaatttgtatggtgccaaaagcttcatttaatacatggataacttgcattacactgtataaagcggtgtcaagagtggtgctaattagggcattcaagcatcaaaacacttcctaaaaggggctatacgtctgcgtagaccgggatttgtaaacatactagacatgccacatttgtgatagtcatatattggcaccatgtgtgcatgatatcctggaagcaggaatccatccacgcactatcgcataaatcggacattcccatcacatttaatagtaagtcatacctctctcgggtttaatggcaatacacgagccacgaaccaagaaacttctatatatatccaaattatgtctatcgcattcctctattgtatcatattttgtcatctcggcattgactagagcagtcacactcgctgcaatggcatattttagcttctacatgcttatcttggtagttaaccctaataggagatgatatgcattgatctcacattcaacaagatatatgtacataactccactaccaggctgtcataccaccatcgacccgaatatctgcagcggttatataggagctctcatccgaagcaagaaagctagccacagccgcgatctcctctggctgcccgatacggccaatcatgatcttctgcgttaaatccgatctccattgcgggtcctcaagcaaaggtgcagtttgcagagtctggataaggcctggtgagattgaattggcccggataccatgctcacgcccttccatggcgaactgacgtgtcatggcaataacaccacctttcgtagctgtgtgggcgatagccggcactccacgaattgcaatccagccgttggcagagccaacgttgatgatagatgcacctgactccttcagatatggccatgcaacacgagtcaacaggtagacaaggcttaactcctggtcaattgttttgtaccagtcgtcatccttgccgtcatcgagccagctcatgtagaccattgctgcattattgtacagcacatcgatgcgtccatatgtttttatggctaggttgacaaattgctcgcagttctcacgttttgtgagatcgcatggggacatggatatcatttcaccacctagctctcgtacagctttgatggttgctgcgtcggtcacagtgttgatgtcacagccgacgattttggcgccttcttcggcaaacttgagggctgctgcacgtcccatactaccgcctgtaccggtgataagacatatcttgttcaacagacgcggtgccatgacgattgctttgggattaatatatgtcaagaaaaaaggatttggacggtggcatgagagtctttctgagaagagaagaatgtcacagagggcagggtcaagggggggccggttagcaagactaaaagaactggctggttagtaaatatctatttgaatgtttgctttttcggggaacccaatcaagaagacttttgaatcttttctttgtttgttttcccacatcaaataatgactccaccggctatcgaaccggaaactcagtagctgcatattgtggctgcgatacatgatcgatggagccgattgcgtccacgatggacgatcggtccgaattcgatagtgtcgatttggaattgtctgccagcgccttgtaaccgaggcttctcctagtaagttagctcttagtggaccaatagcgtacaaaagaaatagtatatacccctggatgcccatgaatatcaacgtcgcctacttcctaaatcagaacactaagctggtttggggttcttgatgcggatgattgcaggtcggaaacttcgagcattctttgggcttttcaagattagccaatatttctacgctctgggtgggcacgagaaagcgctagagccagaccatgtatcaaccctaggcgctgttcataatatcggggtcttatatagtaagcaagacaagctaggtgaggccgataggtgaggccgaatagatgcttctgcggctctaactggacgtgagaaagcactaggaccagaccacacatcaactctagacacatttaacgctcttggagatctatatcatgactaggggagactggatcaagccgagcagatagatcccgcaagaaaaaagaatagccctgcacctgccttttttctctggtcatctctcactatcatagaaaaaagaggggttgtgcaatgcgagccagagaaactgctacgaagatttaattgatgcttaacttcaattgatttactcccatatcgtttcgtcccatagcagcaaaaaaaagtgttaaagccattttattaagatacccttttgaaagagcgcatcttttgggcaaaaacaactgcgtgaccataaatatttgctaacaattaaaacggggaaattatcaatttaatttgataaaaaaaaaacaatgggacgagccgggatcgaaccagcgaccttgcgaacttcagtcgcacgctctcccaactgagctatcgtcccatttgggatagagataaaagcttaattaatattataaatcaaaaatcttttgccggtgtgggctacatacaaaacgacatagaaacccaccatagcccacggtttaaaaatcataagaattagatagtattacaaatgatgtctaaaaatctactcatcttatatatttacatcgttctcaggcttcttttgtcttgcctcgcctcggttggtgctgattcggatctcgtacacgtcaacagtacaacaaatcgatactatccgaattatccggttgactaatatgaaggatatatattgtaataactagttaaataaatcgggtcccatatatggctccatagagcaggccaccgaatcaaggatccatatcaaactccggattgacccacgaaggctgtggtgcttttgcacgcatccaagccccaaacatatgcagaccaccaaagaccaaaaacccgccaccaagtacaataagtccttgggcagtgaatgtccaagtccaaccggaagacgcttgccaattggcaatgaagaactaccaagaagtcagttatcaatatctaaatagctcattatcaaggtggattggacaacataccggattgataaaagcactcaggttcagaaatacggcgtagaaagtgatcacgctcgttgtttgtagtgggtagcagtccacaatgtagctgctggttacagtatttccgatctggataccagcggcaactagaggattgtcagcactgcgtcgaatgctttatgatataatccggaagatagaactcacataggaagaatgccacctggcctaccatccagtggtagtttttgtcgatactgattccccaaacaaccaacccaactataataattattattatcagtagagttcaacatatagtctggaaagtcaaacacaccagtggtgatcaatatagccgggtacgccagccacaaccgcatctccggaacgcggatattgccattcctcttcgccaacttctcgacaataaagtcacttaatcgcccagagcacccaatctccgagaggacagtcccaagaaatagcccaaggaacagcagtccctggatcagaggtgtgtagttcggatacgctgccggtaccatcgtgataacagataaaacccaccagtaccagacgaagctgaatccgacaactgcgataaccactgtggataattggaacgtcaatacaaaccgagtgatggagtcccacggcttgggatggcgcattccgggaataggacgccaattgatgaaagggaggttctttgtgcggcgtagctcggagggtagggtctccggagacatggatgtcgccgtgtcgtctcctgctatttgcttttcaacatcactcgggagagctttgttgccgtcaagacggggcatttgctgaagcatcttgttgcgggggtagagggtctccggcatgaagaagagttcgagaagtagtagtgttgcaaagaggattgcgttgaaccagtttatccatggggcactgacgaggtccaaaaagccgccaactggtgataaatcttagcttttgacgcatggtggtttgaactgtccgaacaacttacaggtaggacctagaagcagaccagcatcaattgctagaacccacaagccaagcttctgaccacgctcataatcatagaacagatcggtcactttgtcaaactagatgtcagatacaaatcttgtctgaaggtgatgattgagacataccgactgccattccgactgtagatgctgggctcactccaaatccttggaagaagcgagcagccatgtagcccgaatagctatcagctccagcagccccaatggtcgaggccagtgatatggttgtcccgactaagaacaccacccttcggccaaagatctcaccaagggatgaccatatgagtggtccgacggataatcctaatgctggcacggcgactgtccagttgacttgcgaatagttgatcgagtattgatcttgaatctctggaaatgagggaactgtggtggttgtgaggtatgtgaataggaaatatctaacaagggttagcaagatgtcagcaagacgtgtagattgttttctggcaatgtcgagcaattcccggagctgatttggtacatacttgaacataacgatagatagtatgccatttttctggaggcttgaccaatttaatggatctagggggtctgatgttggctgggggtgaagtctgattccgttcttgtcgacggctgcattgtgaaggacttgagtgccctccatgggagtattggttgggtcgacatcgtcgttttggttgtctttttctccaaactcgcgtttgtcatcgatttctgttgggcaagatgccatcttgtagactcttgcgtttgaatacgtatccaagagtatataggccggcagatgactatgatattagagcccgccttgatctgggagatgatatatataagacatatatactagatctgtcgattatctgttgccatgtgctgaaccaagctttggctgtctattggtcgtgctgccggggggcccggggtagaatctcggaatctcctgatgaaagggcctagctgataagcaccgcattagggtttctataattccacgaagcacgtttcagcctattacatctaatgagcctcggattgtgaaagccatggcactgcatactattataaccattgttttgattataaaagtcgtccttaggggaagtcatatcatctcattcattaggtatacaactaaacagtcaagttacagtcaaattgtggccattcccttcttgctcctttctgtgtacacaaaccattagaatggttatttcataactatcaggattatcattgctgcaaaaagcccgccactatcaaagtgacaggagtgctgaggacgttgtctgcatgcaccaatcaaactggccagagacgatgataagaggcgaaagataaggcgctctagtcaacttccacttcgaggcaacaattagagaacatcagtggacttccccgtgttagagatcaagactagattgatctattcgatctcattctccaatcttgaagccacagaagtgttggctctaacatgttcgcgtgttgtataccgaataccctgccgcgtcgaaccgtccggtatcggacttggacttgagatactcgaccaacagaaaaatacacatgtcatggcgattattgctttgattatctcaatcatactggctatgtattatgtatccattgttgaatacacatgtagcgaattttcgtattactgactggtaccagatattcgtgcatatacaaactccacgctggccgtggcataatcttgaaataaattcacactttccgaatcgaaagcagtttgctaacaggaagtattttcgcttcttccaactcccttgcttaacaagtggaagaactcacaccgtactgtgcccccacttcctaaaaaccatcacatattgaagccggagccaaatttactacgaagcacatatcgccaattccatcatgcccaacccctccagcaatggaggctcaagtcaccaaccaaccgagtatacttccctcctcgccaagcccatcgacaatggaccaccattgcacgactccgaagatgaaagtccattctcgcgagccctcatcctcgccgagttctggctcttgctgaaagactcaactcccgtaatcttagcctacactctgcaaaacagccttcaaacaatatcggtgttgatcatcggtcgctcatcaccggagaacctcgccgcgagtgcattctcgcagatgttcgccatggttacgggatggatgattgctttaggaggtaccacggctatggacacactcgcctcctcctccttcacgggaagctccaacaaacatgacttgggaattctgcttcagcggggcttcttggtcctgggtcttttttatatacccgtcgctatcttgtgggcttgttcagagcctgtctttttgttccttgggcagagtcctcaactctcacacgacagcgcgaggttcttaacttgtttgattcctgggggtttgggatatatttatttcgaggttatgaagaagtatctgcaagctcaaggtatgtttgcacgagattgatccgggtatggatactaacatgaccatcatataggaatcatgcgagctggaacatacgtgctgctaattacctcaccattaaacgccggtctcaactacctattctgctacacattcaagatcggcctcttaggcgcacctctcgcaacgggaatctgctactggctctcatttgcattgctagttctctacgcacgcttcatcaacggcgcagagtgttggggcggatggtcgcgcgaggcattccaaaaccttcgcacctttgcacgactcgctcttctaggcattgtgcacgttggaacagaatggtgggcatttgagatcgtcgctttagcagctggccacctgggtactgtctcgctcgctgctcagagtgtcattatgacagccgatcaagttctcaatacgattcctttcggaattggagtcgcgacgtccggccgcgttggtaatctactaggaaaacgagatgataccggtgcggcgcgcgcggcgcatacctctgccgtgctgagtatggtttgtggtggcgttgtgctagctgttcttatcgggacgcgggatcactttgccaagatcttcaatgatgattcggatgttgtacgtcttacggctgaagtcatgccgtatgtggcgcttttccagattgccgatgggcttaatgggagttgtggggggagtctgagaggaatgggacggcagcatgtgggtgctctggttaatttggtgagttattactgcggtgcattgccgttaggtatctggcttgcgtttcatggctggggacttaagggtctgtgggttgggcagtgtattgctttgtatttggttggagtgtttgagtgggttattgttgcgcgcagtcggtgggatgtggaggtgcagaaggctttccagcgcatggatgtacatgagactctggaggatgcgatttgaaggatagtagatatttgattggctaaagaattagctatacatagagtttgtcatctcaattagatagaaattgaattgttcttggcgtttacaagtccgctagatgcgaagtattacaacacatcacagatgcgtctaacggttgtactgtgaacagcatcgcattcaataatacattacaatatactatactatactatacaacatccctattaatatcctccgttgtcggacaagcacactaccagatgctggatttagcagatcgccagccaccaatgacgaccggccgataagccatcgcatatattaataaccctaaatacatccccagtcagttatcttccccactaatatttatctcacgttcccactcccaaggacttcccttttgggacgggatagctttgccttgcatgatgtgcccttaaccgcatcccccaccaaccgaggctccacctgacgtcggttccttaaagggaagttacggggagcggggaggataaacgctgcctgccagtggcaaaggactttctctttgtcttgttttcccgaggttgactacaatcttgagctcatgagtgcagatagtacgattgccgagttcctgtcaatcgtgtctgtattagggcaataacggtagtggattactatcgcgtggcaagctggaatgtagagaataaatatcttagaatggatgactacatatatcatggaaggccctgcattttagcactatatccaaacgacttgtattcactttgacactttcaagttcttctctacataaatttgagtcttgatatcacaatgattgcctccatcgcgggcttggttgtcctctctgctctggtcacagctcatggtaaccatgaccagtctcaatcccagcttgctggtccacacgaaggactctggtacaacacactcccaggagatggcggcaagcaggtgagcagcccctttgataagctactcaactcaaacgaagccattcactaaacgaacaaggccgactctgtattctccggaatcacaactttcggccgcctgccctatttcccatgcctggccagtgatgccgagaaatacgacatcgccttcctaggttagtcattaccagccgatcgagaccatctcatacaatgcccctactcacatatctaccgaacaggtgctcccttcgataccggaacctcctacagacccggtgcccggttcggacctagcggtatcagacaaggctctcgccgcctcaatctctagtatgtaccagcccgggagacagagatggttatgcatggcacgaacaaggctgacgaaattatccttttagcggtggctacaatgtgcctttggaggcgaacccgttcactagcgatatgcgaattttggattgtggcgatgttcccgttacttcgtatgtttgcgttcgacgggagatacaaagacaggaaactaatccgacatagatacgacaacgcctgggcaatcaagcagatcgaagagggacacaacagcatcctgatgcgcaagccttaccttgacgctgataaacccggtctttcgcgtgctggcaagacccttcctcgtgttattacccttggtggtgatcacaccatcacactgcccttgctgcggagtatcaacaaggcctatgggcctgtcactgtgattcactttgacagtcatttgtgagtactcttagcattacagcatggacgattgactaatttgattagggactcgtggaagccgaaggtcttcggtggctctcctactcaggttgcgggtatcaatcacggcacttacttctaccatgcggcgatggaaggattgttgaagaatgataccaatatccatgctggtattcgcacgaccctatctggtccttccgattacgagaacgatggatactgcggctttgagattgttgaggcgagagagatcgatgttatcggtatgttatcttgtcgcttccaaggttggctctgtactaataagtgtcaactttaggaacggacggtattatcaagaagattcgcgaccgtgtcggaactgaaaaccccgtttatctttctatcgatatcgatactttggatcctgcttgtaagtcttgtcggagatgtctattgtgggttgtcggtcgctaataatacaatccagtcgcacccgctaccggcacaccagagactggcggttggtccacacgcgagctgcggacgatcatccgtggtcttgacggcttgaacttcattggtgcggatatcgttgaggttgcgccggcttatgataccaatgcggagttgtcgacaatgtaggttgctttgagtggtggaagatataacaaatactgacttttctacagggctgccgctgatgtgctttatgaagtccttactatcatggtcaagaagggcccgttgactattggggagtcgtctcatgagctctgagggtttgtggagctggtgggtatgtcattgtggtgtttgggagcacggacttcaggctttggtgtaacgagtattggttgaggagagaaagagaacatcggaaaggagttttgcatgtcaaagaccaaattgaaagtgagacatgatgatatggtggccgaggcatgttcttgtccacgatggcagttactatatacaatgtaattagattgcattgaaatgaaataaaatgaaccaatgattttacggtaccccatctggacacgcccgagaagtataaatcttattgcgatgttgtatattcaatcaagtcaaagggatccttcggtatagcgccttgcaactcccgatgcggtaagagtccggcccaactccatgccattttattaagatacccttttgaaagagcgcatcttttgggcaaaaacaactgcgtgaccataaatatttgctaacaattaaaacggggaaattatcaatttaatttgataaaaaaaaaacaatgggacgagccgggatcgaaccagcgaccttgcgaacttcagtcgcacgctctcccaactgagctatcgtcccattcgggatagaagaagatcaccaggttgataccatgattaaataatacaggatggtcgctttcctagggttctaaacggcatctacgaatgcaatggataaccatctcgcagtacacgagtgcctattataggtgcatcctaatatctttgaatactaccggaagatattaacgtagtaactcaatctactaagcgatgcaatgtatgtattaaggcctgagaaccatagaaagacgtaggaaagaaactgttatatatatgcagttggtgctttcaacaccagcaatattcctacacgagctcatgcagaaataaacccagactgtccgccaaaataggtagatacagtatagttatgccatagcggggtatcacataagctcatcatcgtcacccatatcgatcaactgcgtatgtaccagcgtttctccgatcacaaccaaatatatattgtaaccattgcggcgagtgccaggccatataaccttttaatgaacctcggaatgaaactacaaataagtggacatgattacaaaaatatgaccatggacctcgtatgacttcaatgtatatattcaaccctgcgtttgaattggaaatatattttgaaccgtggatagaaggcaattagtttcgtgattattcaaataataactagtcatatagcagaaccgagaggcacaaatatgcatatgcctattatgaaacgaatgcacacacgcttttagagggctgaatacgacttgaagaggtatcctgcaagtctgaaaagccgtacagatgatattcgtagtagtaaagtatgatacaaggtcttagatactcaggaggacttaggagaatcagataagaagtcatagttggttgcctttagtttcactagttcttggctctaccataatcttcatcaattggaattcaaatactgaagatgacatcatcccagatgagtcatacgaggtccatggtcatatttttgtaatcatgtccacttatttgtagtttcattccgaggttcattaaaaggttatatggcctggcactcgccgcaatggttacaatatatatttggttgtgatcggagaaacgctggtacatacgcagttgatcgatatgggtgacgatgatgagcttatgtgataccccgctatggcataactatactgtatctacctattttggcggacagtctgggtttatttctgcatgagctcgtgtaggaatattgctggtgttgaaagcaccaactgcatatatataacagtttctttcctacgtctttctatggttctcaggccttaatacatacattgcatcgcttagtagattgagttactacgttaatatcttccggtagtattcaaagatattaggatgcacctataataggcactcgtgtactgcgagatggttatccattgcattcgtagatgccgtttagaaccctaggaaagcgaccatcctgtattatttaatcatggtatcaacctggtgatcttcttctatcccgaatgggacgatagctcagttgggagagcgtgcgactgaagttcgcaaggtcgctggttcgatcccggctcgtcccattagtttttgcttgattttttagatcaatcgacgtgtgatgtccgatctataagcctcgatttgacgagagaagatccctatgcacgcgggtggctagttagaaagagcacaagcaacggaggtagtatcaggaagcactttgagttcggcaacaagtttctatagaagtgagaaccgtaagtcgacgtcttggccttatttattgatagcttgctgtagacgttggattaaatggcgcacaagatagttttggcgaagtacctcgacagaattgggcaagcagctgggtgtgcagacgatgaatgtgcggacctggcttgggtcaatgatgtagtcattgactggagtagaatgttagaagctgacatcggatacggagtatatatagggacttaggattaatggaagacggggtcgttgtcgggatcggaacgaggtgtgagcccagcgtcaagacctaatcccctaaaataactatggaaagagaaagtagaccgcaaatcccgaacataaacaataaacatagcagtaaaattgactacatgactatgaccaaaccgaaaagccacagcgggtatagaaaacactttcattgatcacattgcctcagaagacagggatatcacggccacccctccataggcagcggtacaccgtcccattcgttgccctgcgtcgcaggaacactgacctcctcctcgcaagtcccattaagtatctcatcagcagcaccaccccagcccatagactcaagttctcgaacaaagaaatcacgctcttcctccatcatagacgcaccctcttcaccgcccatgacatccttgtactggcgcagatgccaccagtgcgtaagaccacgaagtgcctgttccaacggcaaagcctcatcaacctcagcatcgacatcagagccagcgagccagtcgtcgcgcagctccgggcggcagtacaggtagatagcggtaatgacgcgcatgttaccctggcgccatttgcggccgcagtaggggacctgggatttgaagagtttgagggtgtagaagcggagatacgggtctggaatcttgaggcccttgcggagaatgttgcttgatttgtactgcactagtaagaggcagcggtgggctttgttgcgcgtgatcttttgcatgatgtgtaggtaattgatggcggagaagaagttgcggaaggagaatactttgattggttctttggggaggggcgcggttgggtagcctagttcgtcgacttcggggcgtgtcggtccgttgaaaatatccgctagggattcctcttcggagagacttgccatactgccgtttgccgttgggtcgcggtggcgggagattgggggtggcatggcttcgtcttcactttcggtgtcgccaccggagttttcatcggattccaaggggaagtccgtgttgttttgacagaactggaagaaactagtttttgtgttagtgagcgagctagcgaatgagattgagtaacctacgatagatcttcccggtcattcttatttgccaccgtttggtcgacgtcttggtgtgcgaacattttgagaatcaaggggatatagttggagtcgagtagcagctgtgtcatgtattcgaatttcaagatatcttgatgagttagcggcagatcagtaagacaaaaacacccagattttagactcacgagatcgcttaaaccacttaaggagaagtaacagagttccagacacggctttaccagtgatctcgcgaagtcgaatgttgtctagctcatcgatggatgcatcggaaaggagattgtgagagccgttcatggaatgaccgttactaaaacttatgttagaacgaattccttgttattggaagtgtctgagctcacctcatgccctgcgtagtctggctagtagcctgactgaccactgcgctgacatttgtcaagatgattttcaataatacgatggtgatggactgaaggtgagatagagtatgggtctggtaaacagtaagcgaatgtcgagattaggtctcgaaaccgtacactcacataaaacgagtcaaccgcatccaggcgccgctggatatcaggatcatctgtctccttctctgctggcttcggtttaggctcggtcttctcctcgtcacccaaattctcctcgtcacctaacaaatctagatgttcgaagtcatctggcaaatcatccgaaatgttgtcagggaagtgagcagcgtcctcggaattccagccacggtcgtactgcataaagtgttcacgctcctgccaaagctgtcgcatcgcacgagtcattttcacatgggtcgagaaaagctttccggcttcaataattgacgcaggaacatcactgccttcccatttctttccaaccaaggcatcctggcgttgcgttgtgcccttcccgccaatgctgttgctagaatcatccagaggagggtacatgaaggggaaattctggttggtctgatagttctgtttcttcccagctttccctcctggtccagcgggagatggcggtggggacggcgccggggttgcaatatgaacggcctgttgaaggatagagccatttccaccggaaatcgagggggcaacaccacaaaagataccactggacgagttcatcttggctgcattgtgtggaagagggggtagaatagaattgttctctagttctagcggaacgacaagtggcggagggttgtaagctgggtatttggaagtgatttcctggcggaagagatgatagtccagaggggaggcgtataagaatggtgtcctgcgtttggcatcatccttctcagagaaaacatcaggctctagtacttcctttgcgcgctttaaatcttcgataccgccaaagacgagaagcagcgacttccacaacaacagcaggatcctggtcagcggaatattggcagattcgtcccagcgcagtcgagcgataatttcaacaatagagaccaatagattgggattggagctggtcagtgcatcgcggattgagctgcactgagggtcgcgcgcctgttgcctgcgacctacttctacggcgaagtataagcttgtgaggaccaagttggcctcacgctccggggccgcaatatcgccagggttaattcgctcgtaatcaatgtcactagtgtcagatccgagtgctgagcgggtcttatcaaaaaggcgacacatgtactgtaccaatgcagtaacgcccgagcattcctcgagaagggaaacattctgttcgatgcactgaatctgcattgactttagcagtggcgtttcggctgctgactcgggatttagatcagaaggatagtcgggtgccactctcccaccgctaataccccatacaccagtgaccacatagcaaatggtttcaagggcctccaatcgcgcggagacttcagaaagcttcagatcctcgagcatccgagtaataaacgaacgacgtaagtctttagaggcctcaagccaaggcaccccgggcgtgtctcgctggcgtcgctggcaaaaggtaggccatttcttgttaaaagtccctttcatgcccatcaacatgacacgatcaaaggcgttatactggaaccactcgtcgagctcatcggggaaagattgtgcatcggcatattcaaaagcataggctggttgctcgatcttgggcatttcacccacaagcttccgcaactccgataagctcagagagctcgcaccccggtccgtggtctcctgaacgggagctggagggggcggctgcatcggaggaggtggagcagagccttcacgacgaagttcaggtcgtttcataaatttttcgggcgcagagaactccgtctcaggagcgggtgcggcttgcgaggcctgttcctggcggagcccctcagcgacctcctccaagagttggtcgtctgaaactggcgagatatcggtcccagtttggtcgacctcatccgccttgacaatatgatgctcctgcatagtggattcgggtggatctgaaggcgcgtccatcattggggacttgttgagttgttgtgttcctggcagaaagttgttcggtggatcgatcaccagggtaccaacgctccatacatcagtgaaaagagcgaaaagaaggaacgaaaattagacgaaactcatgtaaatggaccactacacattttgtaaagtcttcgcaatgcacgaggggtgtggctgcggtgttgatgcgggaggccagctgacacgtgaccggactacaaagccattgtgtacgagatttacgaaatagatagaaagagtcagaatataattgatatcaggcagttaaaatcaacaggcaggtgtccgctcgctactatggtagtatacgctaaaaggggctatcccttactccgacttcttcccactgaggccgagacgcttcaacctctgagactcccaccgttgccagccagcctcagccaagtcttcacttaagacgagatcacggattctgactaaccgggacacagtgctttccatggcccattcgatcaacccactgcttcggagcaggctggtgaccatgaaccagccgcaggcgcatacaaatccagcggcacagccagcaaggacttgtctcggggtgtggtagttgaggtagacgcgactggcagcgacacctgcagctccgatgcaaaggcctagcatgaccaggactcgtaataggacggcaacattggggtatgagctggcggaagcttggctgtgacggaagagaaggaagaaggtgaggtagacggagaagaaggtcatgaattgggcgtgtgaagatggcattccatatcccttgccgaacatttctgcgaattacacgtgttagttttggaaggtacccagacgacatcgccgacttacccttcggtcgctcttccttgatgaaacgtttgaggacaaagttcaaggcttcacagcccatctgccctacaaacatcaggataacttccacctcccttgttgaccagatcaaggttgcataggaaacgcatagtgcctgaggaatcagggctagccatgctgaggcaaaggacagtcggtcctcagggttctagaaacatagtcagtggcaagtcaacagagatatgatgacataactaacgtagtggacatgagtcagagacaacgacgccagcggagtgtctcccataatgaatcaaaagagtgaatggagggaagttcgaaagttccagagacccctaaattcgggagatttccatttcagggatatcccgatgccaagcctttttcccttatcggcgataagcagattgggcagcggggacttccagggcttttcgacttggcgaattatttttccttcatatcttcaggcatccgaggggatttgccattctttttggggtttttggtttcttcatatcttcatctcttcactcgtctcccttctagtcacttcactttcaaacaatgacgccgttgttctctatccaaaccccagactctctattgcatcatcttttagacccctcccgactttcagccgaacattggcccatagaaggaatactcggcacctcttcgtctttggttggtctgaatttttaccaggatctcagtcacaacgctgatttgaagggaatcttcctgcaggatataaacctcccttttgtgcccgatcgtccttagtgacagttcacttgagatcggtcatcattaccttcagatttttttacgacagtcatgagccagcgttgctgagagtttttgcaggagacaccattgtctccaacttgcgatccactagcgttataccggaggcaaatatataatcatccccacctgagaaatcttcacaagtgatcatactcggtttcatcccgccatgaccgaactcgactttccagaggatgagcgctcagtcgagctttcctcgatagctgccatctttccagagattcaaatcgatccgtcctctccgttcaaagccgttctcgatcttccagtcgcaccttcctccccgacctcaatatgttttcagcaaccgcttgatcctgcagctgccgccatcacccctccaacctcattggacgagtctaagggagaattagaccagccgcctattaaagacatccatcttctctcgcacctacctccgcttaacctcgagattgaattgccagagggttatccaaccgaaaagccgcctatcgtccatctaaaaacgatcccctcgtggctacctccctccgtcatagatcaattatccaacgattgcaaccgactttgggaggaatgcggaaaggatctagtcgtctttacctatattgaccatctccagcagctggcagaaactgctttcaatatccagaatccgtcgggagaaatatatttatcgcgggacttgaagatcggactactagactacaacaaaaatgccgagcgggaaaagtttgagcaggggactttcgaatgtggggtatgccttgaaccgaagaagggcaccatttgccatcgattacttcgctgctcccacgtattctgcattcaatgcttgcaggatttctacaattgctgcatcaccgagggtgatgttgacagtgtgaaatgcatggcgccggattgcgaatacaacaagagacctgtagctgtaccgggcgacggccagaccccgccccgcaagaagcgtgatcgtactctgggaccaagcgagctactccagattcctttggaaactgaaatggttcagcgatatgcattcctcaagaggaagaagaagattgaagccgataaaaccacagtctattgtccacgacaatggtgccagggagctgcacgttccaagcggcaccccaagccagaagatcctatgtcggatgacttggatagttctgacgaagaagatggatccgaggcccgcggcgaagtgaacgatggagagcttcctcctatggcggagcgtgtgtctatctgcgaagactgcaactacgcattctgctgcgtctgtaagaagggctggcatggtgaactggtacgctgtttcccacgccgcgacggcgagcccacggaggaagaaaaagcgaccgaagagtacttgcgtctgtacactaccccttgtccgacttgcaatgtgccctgccaaaagcaaatgggatgcaatcacatgcgctgcttccagtgtgacacacacttctgctacctttgctcggcctggctgagtgcagacaacccatacaaacatttcaacgacgagaaaggccaatgttacaatcgtctttgggatttggaaggtggtgatggcatcaaccccgacggggctgaagcacttcaccgcatcccagacgcactcctagacttcgatgatgacccacctgtggtagacattcaggaagaaacagacgaaagtgatgacgaccaccctgcatttgaatttgatgatgatgaagacgaccttcaccgacatcctcctcctcccgcacccgctccgccccaaattaaccgcggtggcggcagacctggtcaacgtgaccacgcagctgcccgcgctgctgcggctgaacgtcaggctcaagctcgcgcaatggccgaggtacgaaaccgaaatgcgagacgacaagccagacgccctgttcgctgggcggaagttcctccccaccgtctccctccacaggcaggtgatcctagacgtcctgtacagtgggcagaggttccagcagaaccattggcagacgaagacggccccatacgctgggaggctattgcaatccgaccaggtagagcgcaggcacatcctggtcttcagcgatttttggatctagtacaaaatgaccgtgaagacgaatgggatagtgatgagatggacgatgacttctagatcgaggatctatgtgcatgactcaacattcaatggcacataagaatcttggtctttccctgttcaaaaagcgtcttaatgacattgatgcatacaacgacttgatgttccttttcatttttttcttcacattttccccttcattttgattgcgtttttcatcaattcccccttcgtcttctggcacaccccgttgcgtttccctctttgctttttttttggattttcttattctctgcttcattttcatatactagctcttctctggccaagcgcaggaaatgcccatacatactcctctatacatacaacgtgcgttgcttgcgcttcgtctatttgatattctgcgtttatatgatatctccataattctatggttgtcgatcgcttgactccgtctttctgtagcgcgcatgggtatacaattcctatgttaataaacccatgcataccacaacgcggatccttcattataatcctccatcttcaactccgtgacagtcaatcccaacttgcaataggtttcacaaatcttctcccatacagcctcacctatactcttcgtgtaatcggaaccatccgagtcaggatccatacatgtgctcatagagctcgtcataagcacgagatcaaagttcgcagtcataaccctccaatcattattaatctcattcgtgaagagacgttgggccggtccctcaatattaagcggcgtgttaagaggctcagctccacccagacaaatcgcaataaacccggaatgccactcataacacttcaattgaacaagcaattcaaacaacgtgcccatacgaagaccctcatcttgccgcgctgccttttgttggtaccaagaaagacccatttgcccaatccccttgcgaaaccgtccgaccgtgaagactggcggttgttgcgtcagcatacggcgccagctcgcttcaggccggagatatatctccatcttagccgggcttttcgcgagatcgaattcagcgagtttgatgtcctctattctggcgcctgcattgctgctattttgcaggtcttttgatggaaatgctgatttgaatgcttgtgccagcatggggttgtagactcgtgtatctgtcccgctgttttcgctggctgggatgaagaatagggctttttgcagtgagcgtgatgtgcggattggatctgcccaggtgtgacagacacgttgggcggcgattagggtgcgcatgtccatttggtggaggattgagatcacgatctcgggcatcgcgagagccctggtctgggctgggtgttgggtgtgcatctatagtctgtgatgcttttgtaaaattgaaacttgaattccagttgtataatgagctgcgctggtgggggctcggggtttttgttgattgcttgtccgagtcagctgggctgagacccttccaaggttggaagcgcttgactacattgtacgcaggggcataggagccagggttactttcggatttaataatgcattgcggccttagtgcctgtatttcgcctgatgttggccttaaacctgaccgctttcaggccctacctttattcaggaatctatatgtattattttctcttaagagatatccataattgattagatcgctattatctctgagttcaggttcaaacagcccaagaatcatgcggtgtatgaatttgcatggcagaaatagcctcatattcatggggccagatgcgcgggtctccgtaattgtaattcaggtaacgtatttcactaccgagctgcacaccaccgagctgcgcagcccaaaacgccatagtaaatgcaacatattccacatttatatcttaacgaccacttttcaacttgctttcattacttgtcaataggtatcaataagcatttttttagcaatatatctcaatttcaaataaatcggaaagttgcatcattgcggtattgaaggttgcaacactgaactataggaaatatctatatcacaatcactattatatagagtgatcagatatcatatagagaataatgggctacaagataaagtttacattgaccaccgttgttgcaatatcatgttgtaatttatcgcttttactatggtgaattgggctgcgcagctcggtggtgaaatacgttaactaaatccgaaagtaaccctggcccctatgcccctgcgtatacattgggatctcgccgtttagagtcatctgtaattaattaatttatggactttgataggcaaattgaagcaaatttatctagaaaaacatacattccaaggggccttccaagtcccaagcttccagtgagggtagggtgaatgactaaaattctgcctggcaataaattccaataggagagttatgaacctgtggcatacttagtcgcccgtattcgttcattatactacgtgtatatgtaggtacaagtagacctttctgattggatggaagtttgaatagcgattctcgaagtcgtgagtcaggacctgcaagatcacgaagttgtcagggtggattgattttctagcaaagcaccggggaatgcattgggttgggatcgacggctgcgctttggctacatagtatatggggatattatcttccaaggttccaaagttgatatcgaagtgggacccgtggtcttggaaaagaaaacttagttttaggtgactgaacataagatttaagcttattttgagcggaaccaattaggcttatttcggttagagcctcaagtgaccgctgtacgaattgattacatattttttcatactatttatcgactaccagtattgaatttgaggtggaatactgaattagatactccgacgggtagaacatgcctcttgtaatcaggtttcacgaagcgtaacctaatttgatcatcagatcaacctctccagtcgtgccaaaactcatagctcatgactgtgagatcagagaatagcaaaagcaacctgtaatgtcgagaaggatggtaaccatgccaggtctcatgaggttggtagatttccgaggcataggcgtgggtttcaggaattgtaaggttcgggtcttcggagctagggataatatccgggccagagggactgaaagcccaggattcgggcgggtttgcgacataaggttcatcttcatctgggttgagtagacggtggttgaatttcaactgatccttggggttgacatcctggggaatacaagggacatccggtggtatctcaaatccaggcatgggacttgcagcaatacccataagaggtagtggtggacatccatcgtccctctcctgggtgatgaaagggagaagccagtctaggcgaaaagtgtggccaatttcttcctgccatgtaagagtgatgatggcaactccaccggcctgggaggcggcaataacgatcccaagttcagggaggtacttgaccaagtttaagcgatcacaggagtagaacggagaatgctctaccagcgaatcaagtggagaccgagaaaccgtccgcaatacatggtctaatggataaggattcagagtgatggtatttccagaaaaatggagaatagggaaaaaccgagggttggtcgctgagtaacaggttagcattctaatctaacaccgaagcacgtcgctcacttacgatggtgtacagagcctgtcaaaacatccacttcagcagcaggtacttcagcagcaaaatccgggccccattgctcattttcttcttcaaccaaattgttaataccacgtctcacgcgaatcgagtgacggcgcgaagccacctgctggtcttgtgatacttcagagctgacatcagtagtgtcaacagtatcgggaggagaagctatttcggaggcttgtagagtggtattgttatgctctgagctcaatagttgcggtcggaattcagtatgaacacagccagaagggaaaatatcgtcttctagaaatatgctcgaaaccgttgcatgttcctcagcagcgattttctgagaagcgaggacggatctggcttcgacataatcagccgcctccgtcacgtcgaaaaccacctgatcatccatcatggttcgctttgggtcacatccacaggcatgaaacttgaggaggtgctgttgaaccctgcgaggatgtaaaggcaaaacgaaccaccccttttgctctcgaccactctctaaacaatcgtaactggagatatcgacaggacttaagctgtcccagactctccatatggagacgttgttgaggatatcggtacttatcatccacagaccgttggggtccaattcaaagttggcaaacgacacgcatggaatgttgtcaaaatgacccctataggtgagccgcaggttgcgtgtgcgatgacggggcatggaccttttcagaccctgcatcaactctgcattgtgtattgacacccatgtgtttccagagcctcccaaatttgaggtctcagaggaattgggactgctaccatcattttcagacaccacatccatcaaggcaaaagcaaagactgtgatatcacccgtgttcgcgctgacggcgatcaaccgagaaaacttgtgggtagctaagccccaagcactcaaataaacatgttcagcgaagaaaggctttatttcatgcgcatcaaatggtcggccgcctccatatttggcgctcctattgattgccgagaaaatagcctcaacattgtagccggtgacgtttccagaatctgtcgctaaaagcaaaacctcatcaacccccaaatcatcaacaatgatatgattgattgtatgaggcctagagcgatcgatgtatccagccgaatcgggttccttcatcaccgggtgaatgatcatctcaggttgggagccaaggagctggcgaggtccactgggaatccatacgtaaatgtcttcaacttgagctgtaaaaagcagatttcgacgctgcgagaaggccgccttgcaaaatcaaggtcagaactggggggggattatacgaaacagcaactagattagtaggtactcaccagattacacctccaagcagagacagttggcctaggcacatcactatagctcaatgataatcagtcacggtgattcaggtagtacaaacgtaaatacctactcaggaaactagcacaagtcagttcatagttctcacgtggggtaatttgaagacaaacatacgcgttcctcttctgcttcgatattcaatgcttgtacctggggccgatatcgtacgaattccctttccgttttagcacgcgtagagctggtgggaggaaaagacattgctgtaggcgaaggatgcttgcagagaagaatacttctttggatctgagcagcaagagtcgtgaatagtaagatatgcagcttgctctgtcattgccaattgtggagagaacaagccacaagagacagaaggctgggaactttgtaaacagatcatgattaagctggtcgcaaacacctccatggctgcggggaggtgcaatcattcgatgatggaatggctgaccgcccacgcacggaccaccattgagtgcgtacatacctagagcttcgagggcttaggctttctcctccgtataacacattctatcgcatgatggatttggttgctggtgtacgcaaagaaggcagccggtaagttcattcgctggtatcatccttttgtatgggttgaaggttgctaattttttgtctcagcggcggccgcaatgagttcaaatggtccgacgtccaaagttccgtccaccgcgagaactacttaggccactcggtgatggcaccagtcggcagatggcaacaaaaccgtgatcttggctggtacgccaagggtgatgaagaagaggaagaacgaatccgcaaagagcgagaggaacttcaacgtgtcaaggaagcggaagaagaagcaatggcgatcgctctgggcctcccggtgccccccaaagcatccgaaaacgccaacatggtccccttagggggcgctagtagtaccgatgtagtaccaagagaagaagcgatgccagatgtcggaacaacggaaaaggaccatcgctcgagtcaccgacacagacgtgagcgatcccgaagcccgcgacgtgaaaggcgacatgaccgggccgacgatgttgcacgtgagaaggaccggagacaccgccgtcatcacgacgaccgagagcgccctcaccgcagccatcgctacagatcccgctcacgatctcgcggccgagatcaccacagacggcgctcagtctcccgttctaggagtcgacccagccgcaaagacgaagaacatcagaaacgacgacggatggagcgcagctactcgccggctgagcgtcggcgacaccccgaacgcagacgagaccgagacgactatgatcgccgccattgagctacagaccagggatatgaattgatgcattagcttggcgttggagggatcgattcaaatgccggataaaccattgcgtaccactatcagaatgaccactatctaatctacgtgacgaacattttcacatcgagttcaatagcttacaactcgtcatgagtagtctttccgaatccggccaaatcaggcatggacatcatgttcaccaccatactagtccagccggtaaagtgctgtgttcgctggccattgcccgagtcagggttgtactgttcccaagcgaatccagtcctcttccactcgcggaagacattttcgaccaaattcttccgcaagtcagagtacatctctctcgcctgttcctggtgaggaccagaaaccgtcgcagtgtcctgtgaaggttctgtcagattcggcgggcaaataaatcaaaagatcgaagcacttacatagagattcttcaacaccaagtagttgatgttaatccagacaggacttctccaatagttttcgtcggtttcgtagaacttatccttcttgcttaagctgcggataccgtaatcactccacagctcctcgggatcaccgatcaagtccaacacagccttgagacgcgggctgtcaggacccaacataccagtcaggaaggggaagatggagatgtaacccttgtggcagacgtgcacactctcttcatattcatcaatggtcgcatcgcagaaggtttgctccttctcatcccagtgcaagtcatcgatgttacgagtgatagcgttctcgtaggaggcgaacttctcagcgtcttcctcctcaccaaggttctcagcaatgcgacgcatagcgcgagtcatcattcccatccaactgatcaaatcgacatgcagctcaccggggtgcggtggctgggctctggggtagtcatcgatgccagaagtgaggatgtgctgcactgaacgtccgcgccagcggtaaccttccttagtcgagaacgcttcacggtcatacgatttgatatcaccgcgctgagtatttctgtaccagttgtagtgcttcttcaggagcgggtagaatgagcgaaggtatgcttcagacagttccgggtgtcggacagtggcggaacgcaggctggcggtcgcatcttggttgtctagggatgcgaactcggtgctcttgtttttactggtcttgactttgtccataaatgcttccaaggccataaatagagtaggcgggtttgcgtaatgaggatattggaccgtaaactccgcaggtaccttgctgcgtgcctcttggccgagaatctgttcgcgggcaatccacccatcctcgtccattaagtggaaccagctcttgataatctcaagcctgtaaaagtcagtatcaggcaaaactagtgagtcaaacgaaagtgggtgtaaacgtacgcaagatcggtatcgtattcgatcacgggcatcaaatggaaaccttcgtcccaaaggaatcctctagggaagaaaggccgggagggaacgcaagtgaaaagctccttagggccttcgataacaggctgcgcggcagccctggcctcggcggtctcttcccagaagccttcattctcctcttcgtacgcagggtttgcggaccgatctacgacatcatcgccgtggaagaacccaatgccaccgatcaggttagataacattgccttggagaagctcgagtatttcggtgagtcaaatggcgcctgcggcggaagaagctcctcaaaggtttcagaaaatgaagccgaagcttcatcaatttctttagtaagggtttctgaagtcaaaggttcggaagcggatccggaggagaataggacatcgaactcgaatggaccgctgaaaaccttctggacaagctgagcgtttcccgggccaggtttgtgcttgatagtaaacagctgggccgggggcggaatgttctcttttccatactcttcaagggcttcgtcaacctctgccttcaattgagtgaagaagattcccttcgcttgccaaagttgctcctcagggaaagccacactagctacaatgctgcgatccaatggcttgtctgtggagctaggatgattgtagcgagggtgcgagttggtttccggtccagtggtgacatcgatagcgaaatcaccaagttctgcggagtatccttcgagcttgacattgccttccactccagtggattcagaggatgcagaatcggcctccaagcgaccgaatccctcgagagtggaataaaagataacggagatgggctggtcggggtctgcgccctccctaggcgtgcccttgactcggaatccccagctacctccgtgctggccaccgggtactttgatgaaatcgatgaccaagtccaaattgttcccagcgtcatgaatggtttcccgtccaccttttcggatatcgtactcatcccagccatacccagccattccttcattttgttcgcatgtgtgtctaaagtcttcggtagatgttagctttaattcaccaatgcaaccgggctgccaaggatcacatactttgttgagcaccagcataatcgtcaacctttccccagatcaaccccgccgaaagactcttcggaatgcgaggacgcaccccaaagtagagattcgacttgtaggggccccaaagcaaggactcgttgctggcacgtccggcctctcgaattaggacggacacatcattgggatcttcatttgcaacaatcccagtcgcatagagaagcgacgtcaataacactgaaatcccgaggttacgcattatgtagcctcattcaattgactgctgtcctccgcgcggcgttaagctataggtgtatgtatctccacttaccgcctactaaatacagactagtctcatatgcgtaccgcgtcacccatacccgcctttcctcgtcggctctagtgctcacgttgtctacaaactataaatgtcgtgctcatatcatagaaagggtgtactatatttttgcgatagacattgtgtgacaagtatctattcagatgaagtttcgtggatccaacgatccaatgtttgcgctcttcgccttgccatcaaatacaaactcactcatgagcttccctgtacccggcgcattctggataccccagcaggtatggccagctgcaacatacagtccctttacatcggtcaagccaattagtggcccaccgccagtttcacagttaggaagatagcaagcctggcgagcgcgaacctctccgtcgcgcagctcgtcagaaatgctacccacatgatctatgatttcctggcagcgcgtctggtcaacctggacatctgcagaagtctttggtaatgagaccgttctatctccgtcgccacatgcatagacggtgtcatcagggcgcgcgtagatctctggcgcagccacagttgggcgtgacttcttttcggggttgaagtcggccgggatttcgatgtttgtaaacaggcagtatgcgctgactggtttctttggctggatcaccacgctgtgggcccgcatgcctgagatggggacctctgggaggatagtcttcgtccagggaccagcagcaacgagcacatcggttgcggtgatggtttttgtttcacctgatgtcttatcagtgtatgtcactgactgcacagaacccttggaccgatcaatatctgtaacctgtccaagaatgatacttgcgccctcgtcctgggcgagctttgcaatagaggtagtgaagaagtatgggtgcacttgagcagtttcgcccggtccactcatattttcataggaccgcagaagatccggctcaatccaatccaagtcctgggggattttggcagacttcagcttcgacatagccgctgcactgcgtttcagcagagattccctatctccacccccggatttccctgcagtgtgctcggcaagagcacgacctctcacgacgagttggccacaattgacctctctgtatccccatcgattgataccatcgtgctcttttgcaagttcggcatgcagtttgtagctgagaccaacgatgttgcttgggaaagcccattgcgccagcatgccacccgctttgcctgatgcagcgccggcgatttcacaggcctcaatgagtgtaatcttgtgacgggtagggtcgtatgacgggtgtcttgtgaggtaatatgcagagcagcatccaatgatgccaccacctgtgaggattgtggttagcaagttgcgaataaacatgcggggtaggaaagtcgcgcaaacaatatgttcttaccaacaataacaatctcacgccgatctcctgttgctgacatcttaaattttggcgttaccttgggtgctaatgatcgcaaagaagccactgtgtagagggttagttgtagttgacaagtttgaacagcaggtgtgctcatatatagagaatgcctacgtcactggggatctagtctgtccagtcatatgtcgcatccgcaatcaagtcgtgaccggtttttatctacagatttggctatgaatcattgaatttttttggttcactaatatttgaagtaatgaaattggtagtaaatccacaaaggtttgggccatagaatgggaaggaaaaatatcaagccagcataaaaagtactccgcaaatgcatatcgtgtcgaaagaaggcagaaaatgtccagtgaatacaaagaagtgtgagaccgtaggaataggaaggatttaaaggttcatcgcgagggactgagaggccggttgaaaccaccctggcggttcatgtactgtcggtactcgatcttcttctccttccgcacaccatagatgtcgttaccggggattttggtgttctttgtagtccggaaccggctgaaacccatggtctttcgcatttgtgcttccatttcgtcttcgcccgcatcttcattgaagtccacgtccatcgcatcctcgtggcgatctggtcctggttgtgcgccattcgccttctgcccaacatctcgcgatcgagggtctttgcggtcgccatggcggtcactcttagggcctcgagggggtgaccgggcctttgtgccattgcgatgcggcgagcgggagcgcgaacgttcgcggaacttgacgttcttgggtgcattgcctgatatttatatgttagcatggcacgagtacttcaataattcaaatctttcaccaaccgcgtctatcctggttgcgctcccggctagtgctcctctttcggttctgggccccacgcccatctctgtcccggtcgcggcgatctcgagaccagcttctatctcgccttccatccttgcgttcttgtgagcgagagcgataccggccgtcgcgtcggtcatctcgtggagctggtgagcgtttgcggtcgcgatctgactcttgctctggtgcatgaggccgtttatcattcgaatcccacatagttgagctgtcgactcggcgagcacgttttgcaggtggctccgccattgttaaaaaggtctggtctagtctgggcgttgccccgtacaccttgggtgtttgaggcagctggggccagatgaggatggctttactcaaatttcaagagcttgagtaatgataataggtttaaggagccctaaagcgaatgcttgtagggatagaaatgtagagggtatcaagttgtcgcaatggatgtcggcctgaatctctcaggaccagagagaagtttattccggctccgggaagagacctgtcgtgcattttgtgacatggcagattgaccgatctatagccgtgacaaacaaattgtacggttgggattcaattttaaaactgctttgatcagtgtcatcaatagcctgatgcatcgcttgaataatcaaatgtgatatatctaaatgaacccaatgaaaccctatatgtacgagaaggagtatatgacttacgactgcactatggcactatctaagtatcttgcgcgatatatcgtaggtttatatggtatctcactacctatttcaccctattaatctacatttctcacctaaattcttcgtataattgataaaagcatttaaaaaaacatccaaaaagacgtccaaaaagagtactacaaaactaatattcttgttaatttaaattgctctatagggatagagcacgtataggtatagaaagtgttaagaatacagtaactagttagagaacaatttgaagtaatttgacatattccattgtgtcagattgaatcaaactgaaggtagcaatgcaaagcctcatagttccagatataaagtgatcgaagtggcacagcgaaaagaaaaatatgcaccaagttagattcagaaatcgatttctgctatattgataccaagtaggcccaaaaaatgtgttagatcggtagatcatggattgtttgaatcgctgattgagacaggcgatgttgtaaaccgtaggctgtccactgacgcactttcaaaacatgcctgagcactggatctcagggcactagccttgtctttgccttgtttgtcaggtgagctatgtatcatagttgcacctaacgacgatatagcatataagcaagtagattgcaaatgcagatgccaatttgaaaaattaggcatcaaaagggatgaagccatcgaagcagatgtggaaaaaggtgattctgactgtccgccacttttggagttggtttgaggagaacacctggcacttcatgcttgatcccactggactactattttgaccagagagataattgtcacgtaggagagcactttgaggcctgtcaggaacaatcaaataaatctgctgtatttattaggtccagctcctgtagaaaactcgaatggtagagaagtcctgtcgtctcaatactttcctccatatgtagctttattgaccaagcataaattgagaggcgcagccaattatccggtctcagggaaagtaactggagtattggagaaaggcctcatcaatttctggtgttttctcaccgatgcggctcatctccgcatagttgaagttaccattcatccaattcgcagactctgaaaccaattcagtggagggctgttcaattgagttgccacttctcgcaatggcggatattgatgattcctcattggtagagcttgaaaccaaggggctgggttggagtttgagatgaacggtgatagggtctaccatggatggcagagtttgccctattttggtaagtaacaggggaagaagccttcgacggcccccgggaaggtcgtgtatgagagtaaagaaatgcttgagataatcctgcgggccaagcttgaagcccgaagaacgtagtctagccgttgagaggcatgccatgacatcaatcaaggtgcacgccacctcaaatattttttcaatctacagtatgttagaaaatgcttggtatgtttaaaggtaagccatacaagaccaattccgtgagtttccatactctgcctggataatttccatgtcgcaaagcagagatcttcagcaattaggagggggtagcgaaaatccatgcattcatgactaggctttgtcgaaagaaacccagcagttgtagatagttgccatatcatgatacgcagccactgctgagacacacgcaagtctgccatgagtatatcaggcagatcaaggtctgccgggactgcactttggataagctcctcaaggcgaaccagcgactcaatcgagcatgtggcattcgttccattccactggctcagaaaactttcgtcaaatgggcggtagaggtttaccagacaccgaaagccaatggctgatgcattttctagtacattgtcttccaattgagttggaagtgggtcgtcttctaatcgagggctttcgggagtgacctgtagcgtaataggtctatgtcggcgaatagcgtgagctctgtcaccgtgttagcgaattactaatgaataggcgaagaaaatacctctcggacacgactaggagccaaaacaatttgcctgccaaggaagggtcatcgtcatccacctgcgccgatgatgcttgactttccagtgcgctagctgtataaagtgtcgtcgattcgcggagaaaataatatgcatgccgttggtttccaagtccaatatgacatccatacagaaggaaagcgatgataatgctttgccgtataggatccgtgaatggatcgatatgctttcgagcttcagtggcttcctcaatcagggaatttcggtagtcttcggtacaaaaaacccgagagaattccaaagatgaatgctccacggcaaatccggtttgagtgaccacaaaagcgcagaaagcagtgactagacaataagcatggaggcatgtatcggcaaggtccacccgtttctgaaagctgccgggttgtaaaacgggcactgttcctctcattcgcgagaaaaaataccccgagcaggcgttgacaagctccccgctcacaaggcccggggttttcgcgaactgacatcttcccgaggtttgtagtgactggggagttggtatagtatccccgagccctagagccattgatggcggagaaatattcgcatcctgtgccagcgcctgttcaatttggtttgctctgagttcattgagaatattggctgtttggccctgtctccccttcttctgtcgttgcgaggaggttcggcagaccaggccagcagctcgacactgctcacaaggttttgggaaaatacatttgactttacgtcggcgacatgcatcacatgcttgcttggccggtgggtctggcatctgggaattcaggtacaaatataccgagaggaactagcagaacgcaaagatccggggttgcggggggaagtcggggggaagtcgggaagaaatgggaattgtggccttgtttgtcaggccccaacatccggtagactcctaattcattctcttccctgtatccattgtgacttaattcgtagtactagtggagactatgtttctattcacattgtcattttgtgttcagaaaagaagaagccaattctaaaggcctagggaaatcccctcaggggtttcctgctgagctacaagccgtggaatgctgagaaattagcgacatcggggaatattataaccaggcgtatgctacgcagaatattatcctaggaaagcaagatttcaacaaacatttatagaaacatattgctggttggtattctacgggatatatctcagatataaacacgtccttcgaagggcttcagggtttccagcaatgaatcggagtagttgcccactagcaacttcatacccgcagtactcgcagcctgtgtgaatggctgagatctattagtaaagttcagaatgaccaatgcccgtttatcttgtctcgacttgacaaaacaaaacgtctcttgattctcgtagtcaagtacttcaaatgcaccgtggatgaataactcccggtgctctttcctcagacgtagaacgtttttccagaaagacaacacactagatgcatcactctcctgtctcttcacattgatctcaccatagagatcatgagctcgcatccacggtttcccggtagtgaaaccagcatgttccgagccatcccactgcatcggcagcctggaatgatcgcgagccaggattcgaagaccatccatgatctgctccttgcgagtaggatcggctccactctcactgcgctgctctgcttcccggtaataccccaatccttcaatgtccttgtattcctcaatgggccactcgcgtggtgcattgatcatgccaatctcctgtccctgatatatgaacagagtgccagtcatagtaatcatcatcagagccagcattttggcagagatctcccggaactcgggtgaatccgatccaaatcgagagacagaacgcccgttgtcatgattttcacagaaagcggtggtccagccatccgttccctcaataaaagactgccacttctgcacaatggatttcatctttgtcaacttccacggcgtaaagatgtacttctcctctagggtgggtcccatgccaatatggccgatgtccaagtggaagaccatactaagttctttagccgatgctcccacatattcgatgacgttcttgggatcaggtgtattggctagttcgcccacagtcatgacatccccgtacggagcaaatgactcttcatacatttcgcgcaggaactcgtgaatccgggggccgttgcaccacattccgatggcgggttggatgtaacttttcgggtctgtgatgggggcatctggaaagtttgtatgcttgctgtacttgttcactgtgtccactcggaaaccgtcgacacctttgtctagccagaatcggactgcgctgttgtagatagcctcacgcgtggctttgttattccagttgagatcaggttgttctttggcgtatagatgcagatagtattcttgcgttttctcgtcccaggtccctacatgaaagcatcgtgagttcaagtatactgattattgccaaatatttcaactcacatgtacttcccgcaaaataaccgcgataattgctcggaggcatccgatttcctgcctcatcatatcgaggagggcgccaaaagtaccaatcgcgtttatcattgtccttgctgctccgactttcctggaaccaagcatgctgatcactggtatggttgacgacaagatctagaatcaatttcatgcctcgcgagtgacacgcttccacaagattctccacatcttgtacggttccataagcagggagaacattctcatagtcggagatatcatagcccatatcgtgcatgggtgagtcgtacatcggcgatagccaaacgacatcaacccctagcgactgaaggtaatcgacctttttgacaacacctgggatatccccccagccatccccgttggtgtcatagaaggaagccgggtataccttcgaatcgaggacacaaaagtcaatactgtgtcttgaggaataccttcatgttctcgcaactaacctgatagacagtggcttctttccaccagttatttgtccccgtaggaacaaccgtatcctgtgtcgcatgtggtgacattgtggcttgacacctttattttccaccaggacacccctcttataccttttcatcataactcggcatcaattcggcctgggcaaacgtgggggtagaccctgcataccgccaagcctccggatggatgctgcgcctccgactaacaaccgacttgccgccgacaggctccgtcctggcacgctgattcgtcacatctagacctccacactccggcttccccagtttttcgaatttttggaagcgagtgacagcccatatgcattttccccggatacgcgatggacgtggactaagtcatgcgtgtatcttggacttgagatcttttgtataaatgacgcatcgccccatggtttgtcagtcctgataatgtctgaagtattgggatagtatcagctttcgattctgattaggccttgacaagaaactattgttcgaatcttcgaaatcgcaacacaagttccaatggtgtccatggacgacgaatccgcgagcatggacggcaaagtctcccctgtccttgcagaaggcagactagcatccaggaaggagcagtccatgactctctggcaggctctgcggctatacccaaaagccgttggctggtcagtcctcctttcgtccactctgatcatggaagggtacgatctcgcattgttgagctcaatgtacgcatcacccgcgttcaaccagaagttcggagaacagactgcctcggggaaatgggctgttccggcatcttggcaatccggcctttctaatggggcacgctgtggtgaagtcattgggcttctgatcaatggtctggtctctgagcgcctgggatatcgaaagaccatggtctgtgccttgaccaccatcacagcagtcatttttctgtttttcttcgcagtcaatattcagatgttgctggccgccgagattctcgcgggtatcccttggggtatcttccagactttgccagccgcatacgcctccgaggtttgtccggtagtcctgcgaccttatctgaccactttcatcaatatgtgttgggtatttgggcagttcgtggctattggcgtcaaccgcggttctatttctcgcgatgatcaatgggcctggcgcattcctttcggtgtgcaatgggtgtggccaatcccaatcattatcggctgtcttttcgcacctgaatccccttggtggcatgtgcgtcggggtaatgtgcaaggagcccgacgagcgttgcagcggttgacatcgtccaatgaccccaactttgaccccgaagagacgattgctatgattcaacacaccaatgagttggagaaatcactttccagtgggaccacatattgggattgcttcaagggaacaaatcttcgacggactgaggtagtttgtcttgtctggttagtgcagaccctatgtggccagaatttgatgggttatttcgcctatttctgtgtccaagcaggactgcctaccgttcaatctttcaatctatccctgggacaatacggcctcggcgttttaggcacaattggatcgtggttcctaatgtcctacgcgggccgacgaactatccacatctccggtctcgccagtcttttcgtccttctggtcatcacgggatctctttcttttgcaccgggagacaacaacgcagctaaatgggcaatcggcgtgatgctaatcattttcacattctgttatgacatcagcgtcggccctgtcacatactctctagtctcagaactatcttccactcgtctcaaagcaaagacgatcgtcctcgcccggtgtctatacaatatcagtaacattgtcgtcaatgtcctgaccaactatcagcttaactccacagcctggaactggggtgctcggtgtgcctatttctgggctggtacgtgtctagcctccctggtctgggcattcttccggctccccgagccaaaaggacgcacatatgaggagttggatttgctcttcgagcgcggagttccggcgaggaaattcgcgaccaccgttgttgatccatatgaaggagaggcgacagaggtccatgaggctcatgcggataaagattgaaagtatagcgatgtatccagtcccccgggtaatgccagatatgtaatatatagttagggtgttgttagtatagttattggaactaccaaaaatatcacaattggcttttttcgttcttccatctcacatcgtattaaatgtcaccactgaaaaaagaccgcaagtcccacattatccattacactacataatcggaaactatattagaccaataagctacgccataaacctgagtcagtctgactatcggatttctcatttatgcttacacatattgaagttactcgattcatgctctgagtccacgttcttccatgagctccaatcggtactctttagctttctccatagtcataaggggctccaggtgactttgaacgatatactgtagctccacttgtagctttgccaaagcctgattcacagcacgaaatttctcttgttgaggttcaaagctgggaagaatagaagaacgggtatttatttcctaatctactagggtcggtttcctattgtcaattgcatttacaaggcacaaggaaagataggacaggatgggtaagtgcgctcaattgatgtccgagttgacaaataaggaagtagagaccggcgtaacccgtctgaggtgattcaccacctttctttccccatgataactcccttcatcaccgatacgctaacattgtctgtctattccgtttgttcacattgttttcgaagcaccttctgtctgccccacagaaatggctagcccgcgggccggctcgtggagcctcaactttaaatcccaccacgaaattttcgcagcacaaccccacttcctatgtggtcgtcaacctacgtctccagaaagcaattagacgagaagagtatttaatatcaagaaaagatggcccctatcaatctttcacacaggcgaacgcacaacttactcttgatttcgaaactcttgagcttgcgtgacactgcatcgcccctcacgcttgtcttagattctttggagcaaccggctacgccactcctgaaagaatatatcagacgtgcaaaggtatattggctgaaaattataccactagcgacatctggctcactaggtacggggtggacagccatgctgactagttcgacagctatccaaagtccatgtcacactcgtcgcttttgaaaccctgaagcaaccggatggagtcgatgcttttgtatcaacacgccgcaagagccctgccgatatagttaaagaagtgagcgcagtttatcagcctgttgcagcctccaactcctcacgcagtaagcattgtggatttaaccccgctagtggacgtatacttactgcccgagtagggcgtcttatcctcattgactctattaacccccttctgaactcaaaaagagtcgaccctggatttgatttaccctccttccttggctcgattattgctcccacttcgccatcggccaaggttgatgtgtcactcgtgatgacacatcatcaagatgtccccgaacttccacagcaaagtccctactcaccatctcctatttctgtgttgacatacctcgctacgagcatcatcacacttcattcgttctcgcacgttctagcacagaaggctgctcgcgaccgcagtctggctcctccagtcttcgggcttgaggaagagcaagaaggcattctcctcggccgattggacagattggctggtactggccaagccgagggaattgttattgaactggagcacaggcggaagagtggccgtggtgtactggaatggtaccttctcccgcctgcctcacggtattcgccacagcatccgaaagagatcgtgacgttgcttgacgataatgttctgtacaatcctcctatggagcgagatccaagcgcgggtgatgaggaaccaacgtcgacctttgagctgggtctcaccgaccgacagaggcgcgaaagagaaggtgttgtgttgccgtacttcgacgcacagcataacgatggcccaggcgaaggaggtcggattctttacgacatgggagaggaagacgatttcgatgaagaagaggatgagatttagacatcatcaaatacgatacatgttcaagcaattctctgtgttctagaatcggcggattgtaacccgcaatcaccgaggtattaactatgcgtacattcatacagcgaggcctatgagcatggccacggagagcaaggaatcagaagaatcgccagaaaagaaggatgcaaatgacaagcccgacgccagcgaaaggtccatactgtgagatggttagccaagatcgctcaggggaaatctgacgcaaagtatagacccacctgcttcagcaacaattcccagttgatgcgtacagccgcctttctgtattttttgctatcctcgcggagtcgccccgacagttcacccatccgctccaaactatcgcctcgatacaagaggtcctcgatgttctttgtcatcaccttggtgacatcacggagctcatcgttcagcttgtcaagattctgagacgcgcgactgtcttggtacaatttctttgtgcgctggataaaggtatcaaactcgacaaaggcatagggacggaggtttggtgagaggtactgtgaggaggtataggtagtcgtgaattcggaggccagatcagcgagataggtaaatgcgagtttgcgggggtaggacttgtcgcaaatgcatagaaagcatatatcgtcctgaattgtgtagctgaaaggcatgtgagagattgtccattggcaatgtttgttgattgctggctgcgacttactgtagactgtattggccagactcaatactggcttggggtgcggagttgcggttcaatcgccgaaatatcattttagcctgactcttaatctcagagagctccgattcagcctacggatattgtaagctccagatcagcttaaataatcgttgtcacgtacctgctcgtcgtcgaccgaggctgccagcataaggcctgtttcactttgacatcagcactacgcatcctcccaacctcgcagagagttcctcaccgtcgagccttgcaatctgcgttgacctcaccatcctgaaagcgttgctcttttgttctgaaggacagcgctttcccctttgttttgctgtgagaatggctccgaggaagagcgacgcaaaggcggtaggaaggtcccgtgcggcagaaccacggtgagcatttgcttatcactctcctttccactgacgtcttataataatgccatagtactgctagttctgccgatatagcagaacagttaggtctcgtcatgtcgaccccaacatctgaagcgggctcacaagctaggaccccaagaagacctgctgctagagggaaatggagcgaggagcagctattgacgagcgataagtccctgcttattgatatggatctagtggtatgagccaatcctttacaaatgcgataccagattatctaagctaacgataggctaaaaatttctagaaactgctggcgcgacctgaagcatggaattgccttgaggaaagtgaaaagcgcgaaatcctctctctacttcccccagatgttcatccggaggcagaagctatatcggatgaccctaacgcaaagatcaaacccattcccgactcttttctccgctattcaaacaactggcgcgacggcattcgacagttccagctcgatctccaacacggccgttacgacccccaatggctgcgggaggcgcaggaagccaaacaggagcgcgaagacggcgactttgacgacttcaaagagcgggaatatgaagagttctggggccagaagcaaaaagtcaactggtatgcgatggctggagaaagtgcgagtgtgaggttgggaactcttatagatgaaggtgttatacagccgggcgatatctggaaattctaccatattttcggtaggggctctggcagaattatcatcgaaaaggaagtcatggtatgtatagatctatccactccgtatactgctctgccatttactaactactacaggtccttgactgtgttgggccaagattgacttttgcgattccacccggtgaacgagtctttcttcgaagcaatttcgataaggcggggtcattttcgataccagagaagggaaaagaagatatgaaagtcgacatcgacacacagctacagccatcgcaggccactcacgcaacttccgatggcgaggagataaaggtcgacaccggtaaagcgccacatgaggtctttacatcctccactgagataaatagcgataccgataccgctaccggcacacagccagtcatttcaccttcaaataacgaagagagccaacaagataccccattcagcgttgttattttcagccctggtggtacgcgaaatcgaaaacccaagcgcacgattcctgagccagaacctcaacccccagtgaaaaagagaggacgaccacgtaaaacccagccaaagcaatccgaaccgccgtcccaaaaagtcgaggttccccaggaaatagaagtgtcccaacgcgatgagcagaataccacggattctttttctgtgatgagaatcttgactgcaaaaatcgcagaaaataacagagctgcagcagaatcctccccccaaaagccctcgtgggcagaatcccccttttcggtactttcttccacctctgagccctcagagctccttggaccacatttatctacacacattgaggcacccgctgaggctgagcgggatgaaattaataaacccccaaataccgaacaacagaaagatccagtcccaattccgcctccaactactgatagtgagccggacgagatcatcgttcccaatatcccctcgccaggagcactcgtcttgaagattctacaaatcgatggccgcaagccgaccagccgtacagggaatgcctggaagtcactccgctgctaccgaaacaaccaggacatgggaagcctctttgatgtgcgagaggcatggttccttcaacatggacaacctcggtagctaccttccacttctaaccttccacttctaacatggaaatatcgatacaccagactcgcttacattattacccttgatatcacccatggttgcgaggattaggatgaaaaatgttcggtacatgaccaagttaggtagcttacaatgaacaaatgaacctcaagatgtcggaatacaggaaggatactggtaattttcatacttgatacatatggatcatgtgatataaccaggtgtttgtcttgtttcgacttgtcgatggtcctttctaccaacctatgctttgcaggcaataccttgcaggggactatatgagagctggcaagtccatagtcacctgaaagataatccaagtattgagtaagccttgctgaacaagagaagaagaagtgtcaccctttcctaaagaattatttctgctaactaaacaggactctcaaaaaagattataattacacatgatgcttcacaaaatgaaaggcgccataatagccaacgccatccatgaatcccagctcgccgacaatgagccggcaataccggaggcagtttctggtgttgctgccgcgagagtcgcgttatctgtggatgattccgtcgccgatggggagtcggatgattgagacggttcagatgattcagacgcagtatttgatgcatctcctgggctagacgacgaagtcacaatattggtgcttgaggcagctgtaatggtcggctccgtgctggaaggctccgacgtgctgcttggctccgacgtgctacttgactccgatgtgctggaaggctccaagatacttgtagagatagaagtaatcgtaggctccgaagcactctcagtagtgggagcttccgcagtctcagttggaaacgtaagggaaggggggatcgtcatagttggaataggcgcgggaatgaaattggttgctcgttgacaaaagttgccgccaagtgtagggcagttatatccaatattacagcagcctccatcggcacaattgggaccgccattacagccagttgcgcacctaggtttgcctgatataaatgtgcaagcggagccagaagggcaacatcccccagtcccatctctgcacagtgtttctgttgcttcggggcatgtttgctcctgtcgaggaatgagagctccggtgacgatcgcggcagcttgtatcctccactcggcggcgttggcaaggtggcagcctagggctacggccaagatagtctgccaagcgtgcatggcgggaggattggggggtttgcttgagataaagaaactaggaactcaagactaacgtgggacttcgcgtcctaatgaaagcgtagaaggaggtagatttgatcctacccggatccgaggaaatcgaccccagtcttatactagtctattccgtgcccaaaatgtccctgaaaatgttatctgagtcgtactccgtatgcctccttcatgcttgtgggcaggagctcgtattcaaccccgctctctcgttacttgcaacccgatctcgtattcatatacggagtatgttaatctagcctatatttggcctacttcttcgtattccatgaggctcaagcggcctgtcacccggggaaccaaatgggggtggctgatttgggtatctctgcccatagccagcaagtctgggtttgtaacaggcgaactcaccagtccataattggaaggtgaaaaatggtggccaagagaaatcaatatacggagtgtgtggagtagagcaatgaatcacggatttagggaaactgtgcagagtatctggaaaatatatctgaaatgtatgatggagggtggctaatatatgtctccttatgaactatacctgactaggagtatcacctatttaggaaagagtgatttagccttggacgactcaaatttatctgccaagcccctagcaactcttcctacttttgcagaacccctcctcgctttgcttgactgaactatgggacggtatggtaggattggtgagcattgaacagcattggtcagagtcgactcttaattttagagtaatataagctggcagcgaaataactatcaaactcccgagctcattggttaaccgaaagagaaatataatattatccactaaggcccgtcatttgatccagatatagcgggcataggatctgagtccgtggtaacatcaacagcaaaactagcctgtataaagtcctctaactcttcactcacagtcttgagcttctccttgacactcgcaacaccttcttgtccaacaatatgccgcgaaggagggttttcatggccaccaattgatgtaatggcatatactgtttcagagaccagcacttcaagatgtgcggagcttaatggtgggtgcatggagacaacttctggagcggagaatgggccattttcaatggagctaactcgggcgttctcatcgtttgttggacttggtgtgactggactctcagatgagacagaagcaccgggaagttgggggacaaggtggtttaagattccacggaagagaggcgcttggttgctggcgggtgagtaggcggggaagattggagggacactggttactaggttggtgaggatgccaatttcgatgctgcattggaagatggtgagtttgatgttaaacggggcaatttcgtaagccagactctgtaaaatagattaggttctgcgctaaggaccactccagagatactcacatcacagaatccttcaagggcccaacccgctgcgcagtacattcctagtccgggtgtaccgatatgcgccgctgtatatcgttagaccaatattcaagcaagagacagtatatatttcttactgatccctgatattatcatcacatgcccagcgcgctctttcctcatatgggggagcgcagctttgatgatattgaggggaccgaaatagttaacctcgaattgatcgcgtacaagattcatggtttgagttgaagcagaaagttcctcaactgttccaatcagggcttggggtaggtcagtatactgtttgagggtatcttcagaaatgtagggtcaccttgacttgtacagcatagaagtatgtctactcttccaaatgtaatgactgcatctgccacgactgcctggcactctcccatcattctgtgccaaaagactgtcagcaattaagatcagaattcataatcgagatgtctgccttaatgatcgcaccggatatctagcggaactgtcttcatgcgctgtgcccagccatcgtgttgccccacctcatcgagaaaagcatcaaattcatcccggcgacgttcatcccgttccaaagctgtatgtgctaatccaagaaacgcatagtctccatgcgcgaggacctgccgcgcgactgagaggccaatgggtgaatcccccgcggtgatcagccatactcgaggctcattatgcgacgggaattgcacgcgggcatcaaaggggaggttattttccatgagggtcaacgccaacagtcgaacgcactatccatcacgcgattgcaatttcaaagctgcttaatagcaaagtataagaatggaagatgcccgaaggtcggaagacaaatgccaagaccgagcaagttcccgggcctcgatctaatcgcgtgctaatcgcccacgttagctggccttttggcttcttcttttcttttcctcatccatcatgtcggaacaaaggccacgcagacaggaggagtcgtccggcgtatgtgtcgctgattcaatgttgttgtgttcaatttactgactccctttagtcgggcttcaagggggcccttcagggtcttggaatcttcttgttggtccaatttgccatcagccagtacatgggaaacaaggacaagacagactctcccagcttgaattctgatggcatccctgcatttgccgatcgccccgatcccagcgaagtcgccgaacacagtgctcttcctgagaccatcgccccaatctggccctcctccagcgctgtcgatctcagcatttatgtaaccccgtctatcattgtgcccaacttcaagtcaccggacagtattcttgtggtagacgagaagaacttcacaattggaaactacagtgacactcgcgaaatcgacaccaccatcaaggtcccaaagcaggtccagcagaatggaactctctgggctcacttctttttggctcgtaccggatacccgctagacccaaccgctaagaactacaacaccgctgatgcagttcacttcatccgacctctgaaccagtacctccccaagaagaaggtcaagaagctgaagaaccttctctcgggccccgaggatgatcatgaccaggaggaagataacaccccggatatttcaaccatgtcatactatcaccccaacttcaccctgtccctgatcccagactccggagttcagaagttggcccagatgaaccccgcagctcgccagtatgtgcagctcgagcggactggtgcccgcgatgctagtggaaagaatggatggtactaccctatcgctttcttcaacaccttctggcaactgaagacccatatgaccgagttgaactctaccgtcgagaccgtgccgttgcatattactctcaacaacatggcgaactggaagttcaacatcatcagcagtgttgatgaaggctcgaaacaaagttcccgccaggctgcttatggcaagcctgctcctggtggtggagatggaactgagtgggagatggtaaaggaggttctcttggatacgaacatttggctcctctgcaccacgggtgtggtcactatcttccatatgttgtttgagactttggccttcaagaacgatattgtaagtgatatctccctatcaaaacgtgtggtatgtagcgtcgctaacattgtcactttctaggcccactggcgtaagaagaaggacattgttggcacttcagttcgcacaatcttggcaaacgtcttcatgcaggctgtcatcttcctctacctcatggacaacagtgaaaacacctcttggatgatcatgggcagtcaaggatttggtatacttctggaattctggaagattaccaagaccgtcgacgttcgcttgcgcccaccgccagccagctcttggttgtcgttcttgccctatgtgattgtcttcgaggacaagcacaagcttagcgagaccgaggagaagactaaggagtacgatgaaattgcgttccagtacttgtatatcttggctgttcccctcctgctcgcatacgccgcgtacagcctagtctacaatacccacaagtcttggtactcttacgttatccagacactggtgggcagcgtctacgcctacggcttcctcatgatggtccccagtctctatatcaactaccggttgaagtctgttgcccacatgcccggcaaggccttgacctacaagttcctgaacaccttcatcgacgatctcttcgccttcaccgtcaagatgccctggctccatcgcctggctactctccgcgacgacgttattttcttcgtctggctctaccaaggctggaagtacaaggttgactacaagcgcgtcaacgaattcggccagggaggtgacagtgacgaggaggaggagcctactcctgctgttgagggtgacaagaaggaggagcctactgatgctgttgaaggtgacaagaaggaggaagtggctacccaatcctcttccaagacaacttctaagtcgtctactcgcaagaggaaatgaactgctcagatgcaggtcttttcggcccatagaccgatgaaccatggatcaacgcctttgcataattagtaaatcactcgatttcactacttttggcatgatgctggtgagcattggatcataattattacaatgtcgtagcaagcaatgtttaattccgatccttctaattgaggattcctctagaaaatcactatagagttccggtctttattcatccagcaccatagaagtacaagagaaaagaaactaacaattatgatatgatcaaataatagacgaaggtcgaagtcgttgttgataattacccgattaggcttagggcaattttcgcatctccgcgcccgcttgttcttctatgcaactgccgttggatacatctaaaacattcattgctttgattctattagtttcaagactattgccaggaattgcacacaaccaaccagattgttgtttttcgacgcgccccaattgaggacgaagcatcgcgcgactacgcgctaataccaccatcccaaagcaaagtacattctgtcattctcgacgacacaccaattgtggcaattttacaatagaattcatgtagatggatgtcgacataggtcagttctgtttgtatcctttcagttgaaccacgctaacaattatccaggaagcaaccggccaaacggcctactcgatgcggtcgagcacttggaagctggtatggacaaagcctcttgagacggaaaaacatgttactaatgcaatctggtagttgcatttgtgccccctaagcagagatacacagatgccagtctactagccaaaaccatcgcttcaagcgcgtatgagagcggcattccgcaacccgtgctggcccgtctcctgaagattctgaccacgaagaataacctagaccagggcactgctacaacgctgatcaaaaacctgtacccccaggagaggatcgcgtctaagaatgtcactcaagtggtctgctgccttgggcccagcaagaacaaaccgagcctcgccacacaggctttgctattgcgctggctaattcttgcgtatgaccttttcgaagataggacgcatctcgccaagctttatgctgtacttttcaattatttggacatgattagtttgcggaaaccgctgtgtcaccttctctcactcatcacaagacgaaagcacgtcaagccattccgcattcaagccttgatggagttgatacatactgctggtggtgaagataaagagcttatcagccttctgaggattttcaagaattattaccccgagatcattctcggtgagttcggaggatcgagaaggaatgccctcttcttcaaacacccagacccggagtggtcaagccatgtgaaggtgctgcaagatcagaatatggaaagagtgcaggccggccagggatcgagtttccaagttgttcatcgagggactgtgaaaagaagtaggattgaagtggtcattccgactctacaaacttcacgggtatctcataagcacacgtcgctggaggagcttcgtgatattggccattttgtcgacaagcttgacaagatcgaattaccaaatcagattatctcaactctgggggatgcaatggctcagaaatatcttcacctggtccaatccgaacttgcaaatcatcgtctaaatgagtggctgagaagtttcctggaggataagctggaattgctacgtgaggatgaggatgatgaacccgagacgttatcatatgtgttgggttttgttgtggggtatgcatcctatatcaaggtatggttttcagacagatcattgtcaattcagacattaaccaaatattaggacctcccatcctcgatacgttcattcttgaagtcttatctggaaacgtggaatggcaaggataatcgtgaccacgtcttccggcttctccagtacattcccattgaatctttcgcgtcgcttcgaagtgaattatggtcaccattggagtcagctgtgttggacgagagtcttcgttccagaacagcgttgttgggtttctattcagccttaatcaaccaatggggtgtgaaactccgatcacagtcagacaaaacagaagaatcggtgtatctcagtcaaatcatcgtacacgccgagctcctagcctcttcgattctggagttctcggtggaggatgaggataaaaagtccaagccagctacagtctctgtgctcgacttctacaaaaccctttcagaactcttttctcatgcaccacaagacgcccgattccgcatcacacttccgtacgcgcaaaccgtgtacacactcgccttcacgcctagcatcgccgtgctctcaaccctcaactccatattggccgtctacaaatctgcattcgaggcctctctgagttcacaagttctccaagcacaaaactccccggcttatggaacagatctcgttggtcggttcaacggatatgtcatggacatgtgcaatgtgctatggcgcaaccgtgcacttaacaccgaagacccgaatgcgctaggctgtctcgtcccagcaccgactaccactgcgttgacaaactatatcaagggcctgtccgaagcatccaaacactatgaccgcgaaagcgctttccacattaatcttacatctatattctctcttagtcaccacgctgcaatttgcaacctgtctgcagcttgctttgcggatctggaagaggaccagcaagttgcggatgaccgcccgaaattcagaaagccagtcacccagaaagcgctacaggcgctggagagggatggcggtgctaagattacatggcaggagtaccgtgtgcatatgctggactggttggatgcgattgggtgccggggtactggcgttctgatgagaagcacaatgaaggctttgcgcaaagagtaaactcatagtcggatgaaactgaacaccagttctagaaattaaatttctcatagcgccattgaaatgcttggtatcggtataatacatattgtacatgctcggctctcgatatgagacagacggcagcatagcggcgaagaggtcagaacttctctatcgagttcagatatatatcttgaacactgggatcttcccgcagagcactcaataggtcctcaagatctttcgcttgttcctcgtccttaaccacgaccatgctgtcccggttgggatcccagaatatctccaattcgtcaatgctgagacctgacaatttcgcgaatgtttcgcccacagtttttgtctctgacggatcggtcaagatcacgaggcgacccttatcatcggtggtgatgtccgccgctcctgcttcgatcgcctggtccaagtagtcgtctacattcgcaccatctttcttctccataacaactctccctttcctctcaaagaggaatgtagtcggggtgacgattcctccattgtctttaatcatatagcgaatgtcctgtagcacgcgcgccttctgatccgtttgacactctacaaccgcagccactgaaccaggcagcatagcctcaattgtcagagattctagtgcttgacccgatacactgagtccttgtccgcgagcgattgctgcttcgataatgattttcgggatggaggctcgtttcgcattcgacaacgcgagggctagacgaggattgtacttcgtgtcgggtccccacactagaacatagtattaggatctgagatatgcaaaattgaacggccatacgtactctgtgtagcattggcaatttcctttcccactatttggcgttccctgctcttggccttgtcgtttctggccttgtcatgcttgatcgtagaccatttgttgtgaccggagaggatagccgatgtggtgctgaagtagcgacactcatgacaagcagagtcaacccagcgggattgttgcagcagcctgctaagtctgagagccataatggttttccttctccatatactgtgagttgtagagaagatcggatcgccattgagattccctcgggcggctgtttatccgatctccgcggacagtgaggccacacgataaggggagagacctggggttgacgcaactactatgaactagatatttccaccttttttccctttctttcttgcttatggagctacgcccgcactgaacctatctcatgtcttcctccgatacagccccagcaccctcccctccacaaaatggggtccctgagctcgatgtccctaaactacacgccctcccctctgaacaacaggaactgtacatgcttacgttcacctccgacctcgtgcaatacatatctgaattggaagccgcagaggttacattgcaacaaaaggatctcaaaaaggaattgttcaagatcttgaacctcccttcacccactatcactcgagtcctccgcaacaatctagggcgatgttttggcggaatactcagtaaaggggatcgcgggatcctcttcgaaacaatcacagacctgctggcaattgtgaatgctggcaagagtgaagccgaattaaagattaaatttgctgcggcgcattgtttaggagaggtctttgcgacagctggtgagagtgcgttcatgcagtccaatgttgcgatttcgggcgcactcaaactactgaaatcagcgaacaaccacaccggtcttagaggagttatctttgccgtgctgcgcaagattgtggttggaattggagttcccatcgatgaagcaaccgctcgcgacatctggaagcaggcccgcaacgctgctatcaacgacaagtcgactttcgtccaagtcaatgcgtgccgctgcctggagcagttggtcaccacgaccccattcttcgataacacacatgacttcgaccacctcaagacccttgtatggaaggttatcgacagccccgccgcgccagtgcggcacgccgtagctgcggttctcggtcgggcattaattaagctacatgctacggatgcgcacatcacagccgccccgaaaccgaaatcgaagaaatcgaagcgcatgtcgaagaaacctggcgcggggcttggagatgaggaggatgccgaggtgtcagagtcatcggtccctaagaaaaccgactcgcgcctgtacttccttcttccagacttgttgaggcagctttcatcccaatacctgaagagtaccacttcgaatcgctcacgcgcggggatttgtatgtgctacaaatatgttgtgcgcaatctgggagacaaggttgtcgaagagcgttatggtcagattgcgacgaacttgcttgtcgagttgttgaatcatccaacagtcacatacaatcgtttccgcctccttatgactaggaagtttatcaaaagtattcttgaagataccattggccaggaattgctgcgcgagaacagtcaactcaatgccgcaacatggctcaccaacgatatcctcaaggactacccccaggttattcaagaacgtcgcgaacccaccaagtacacactgacgagtgcggtcagcgctctgtcttcgttgatctcatcgcttggttccgccttcagcgttcaggctgatagctgccgagatgctctgcttcaagtccttcctcaccccagctacactgttcaagtccacgttgcgcattgcctgcgaaacttcgtcctagcctcccctcaccagctgttgtcatgtgtgacaatctgcatgaacagtttgaacagagaaatcggacagctaggcaccccgcgccaatcgcctcgccggtgtgttggatatgccaatggattatctgcaatgctaagtacttctcgtttgcaaccactttatggagcagtggatgtctttgcgcgcgtttttacccaggcaaccgatcttcttaagacaagcagcacctccgagcttcgggttgcgagcatccaaatccaggtagcgtggattctgattggaggtttgatgcctcttggaccaagcttcgtcaagactcatctgtctcaattgatgcttctctggaagaacgctctgcccaagcacctcggcaaggagaacgctgcgcagccaggtacagttgagaccagtttcctgactcatgtgcgagagtgtgcactaggctcgttgttggtgttcatggagttcaacagcaaattgatcacatcagatggtgcaaagagaattggtgcgatgttgcaacatacggtcgaatttttagacaacttgcctaagccaaaggctatggaagatctttcacaaagactgcacccatccctgcaattgcaagattattcaactatggtccgccgacgtgtcttgcagtgttttacgaagcttgtgcatgtccatccacctagccatggggatattatttctcaatccagtcttcttagcctggctatttcttcattcgcagacccagatgctcagtacaagcaactagaaagctctatttctggctccgccggacaattcgatggtttatgggatctatgtgataattatgggtttggtgtcactggactctgccgagaatatattcgtgctacactgtctggcactcaagaagacgacaagagtcccgcttggtgtgcacttgactctgtggaccaagttgtggacgacaccttaactttccctatttgtcaagcaagcgaacacgacgcggttcttctatacagtttgcgagatggagataagcttgctgttgatcccccgacaacaggagttgtcaactcggcaatcgatttgttttctgtggctcttgctcttcattcgtccaaaatccaggaaagcagtgtcgaacagatcgctacattcctcacttctcctggcctgcaaagaaaccccggcaggaaagccgcattggtcgtcaacatctcggtcgcccttttacatactctgaaagttgctgttaaggagacagacttcgtgcctggcaagctgaatccatctactgataaaattttgcaagagcttctccaaaggtttgtcatagatgctgatcctgttgttcgcacaattggcgttgaagcacttggacggctttgtgatagtgctggaaatgcgtgcaccaatacacaagttaattggcttgttgataccattgtcgagaacagagaacctaacgcaagagctggctgtgctgccgccttaggatgtatccacgcccagattggcggaatggcagctggtttgcacctcaaaacgattgttggtgttttaatgtctttgtgtaatgatcctcaccctgttgtccatttctgggctcttgggggcttggaaagagttgctaactccgctgggctgacattctcgccttttgtgtccggctctttggggatgcttgctcaactttacaacgctgatacccacaacgaggaggcagctgcgttggcgacctccaacatcgaaatgtcatttttgacaccggtcgtgatcagccgatgcgtggactctctcatcaatgttcttgggccggacctgcaagacattgcgaagacccgaaatctcattttaaccctgcttcgccaattccagttggaggaaaactcagcattggtgacggaaagttccagatgtttggaccatttctcaatgtatgcctccagttatgtcgacattgcggcatacgtgaagcgactgcaaaccgagcttcgagcaggcaacaccctcacgcgagatgtggcagttcgtggacttaacaacctcatgaaacgagacgcaccatctgtaatacagacagcgggccagtctttggaagatgacatttggcttgcatttgacgaatcgccgaacaaaaagtcactgaagtcaatgattcaggactggcttcagcagacggctttgacagaaaccgagatgtggatccaacgttgtcagaacatcatgaccaagacacgccacaaggcagaacttacgcctatcacagctgttcaaactacagctgccgataaccccgatgacgaggttgccgggtttgcatcggctgctggggaagggcaaggtgatgctgcgaacggaggcatctccagccaagaattattgaagtggcagacccgcaattttgccatgagctgtctctccgaacttctggctactgtccaggaggcaattcttccagactctgccatcccagcggagttggctctccagaaaaacgtcggagatattgtgagaatggccttttcggcgtctaccgccaatgtcattgagctgcgcgtatggggattaaagatcatagaccaggttcttaagatgttcggcaagacaccggatcctgactttgctgaagcctcgcttctcgaacaatatcaagcccagattgggtctgcacttactcctgcctttgctgccgattcctctgcagagctggcctcggaggctattaatgtgtctgcaactttcattgctacaggaatcgtaacaaatgtcgaccgcatggggagaattttgaggctcttggtgctgggcctggagaacttcgcgaagaatccagaaactactgaaatcggtgatcttaagggtctcaactcaaatgctcgagttatggtaaagctcgctttgttctcggcctgggcccggctccagatcgcaagcatcgaccatgagtacttgacccaggtggttcaaccttatattgcaaaactcacgcctttatggctttcttctcttcaagaatatgctcgattgcgctttgagccagacatttctggtagcttggggacaacgtcgagcggtgacctggatgaggtgtatgcggcgttgaaccgcgaaactttgttgaaggtaagccccgatgtagttgttgtaattcggcaaaagctaataatattatcagttctaccaagacacgtggctatacttggttgatgcgattgctgggctcgtcgagaaagatatcgactttgttttcgatgctttggatggcaaattacagctacccgaggagcctagcggcgttgagggcgaagaggaaaaagaaaaagctcccgagaaggaagaagggaaaggacatgatattaattatcgtgaagagccggtcgcattcttctttgtcttgtttggactggctttcgaatctttggttgatcagggaacttcggcatcgcaacgattggagattcttcaggcgctgaagcgaatcctgaggccggtcatctctggaaacgccatctaccaagatgcaattttcacagagaccatggacagctttggccgtcttgtgttgacagaagctacccccatccagactgtcattgtcgagattgcccaaaacctgtcactagaccaccccgcagcaaagggtgatctggaacgcagcgaccatctttccgatgacattgagcaactcttcgagctcacaagaagcatcattctagttctcgctggaatgcttcccaatctccgggaatcgacaccgctcgcgcggttcaacgtcagttcggatgagtctctgactcttattcgtttagcacttcgctctcttgtcgatgttgcatccgtattcccatccatcattcgcaacgatctccacgcttgtatcctgcatattttcacaactatcctcgcaactggagtttgccaagagtgcgtagttccccaagctcttcccatcttcaggcaattcgttcacggcattacccacacaacagaatcacccgaagaccttgaggtcgtgtcattccagctgcggggatgtctcacgcgcttcctgaccattctcactatcgctcagcgacgagaatcggatatctctattccctgcgccaagaacacgcttctcgccatcactttcctgctgagtgccggggcacacgttatccctccccaggagccagtcttgatccgagttctggatgagttgcttgactgtcttcaagacgttggccttgccaccgtggcagctagctgcatccgttcaattctcgttaaacccggctctcgttccattaccgacgaagtgatcagccgatacctcgtcccgcgactgattgccttcatggttgcctgccctctagacaatggtgatatgcctacggaccccgaaaactcccgcacggtagttgctcgcacgctcgtgtcgtgtatctccaacgccactttctccacttccgaactgcccgccgctacatccctaatcatgtcggcacttttggcacgcgccaagcgtgaaggcgagtccgtacaccaagaatccgcgagccatctccttgagcttgcgaaggccgaccagctcactttccggacgttggtggctaccatgaacacagaccagaagtcactgctagaggaggttcttcgaagtgccggagtcggagctgttgcttcgaagactggtgctgatgcggcagagaatgctccccaggctgtgcctagtatagcattgcgcatggacttttaggaacgttatacggaatcaagacaaacaaaacactttatgatatagttaattggcaaatatttcttatatgccctctcggaagacgaagccctccgaggctccgatcacttctcctccatttctcacttctcccctagcccagacgggcgtagtgtttcatcatcctgggaacccgatattcgagcaatttaaagcgtttgagggaatactcgcatctccactttaaatatctgtaaacttgatgagctcctgcttgcccctggatcataccccctagcccccacctctttcccttcgaacatccctcatgtcaggctccgatcacttctccccttgcccagacgggcgtagtgtttcatcatcctgggaacctgagatttaagcaatttaaagcgtttgagggtatactcgcatctccactttaaatctctgcaaacttgagagatcctgcttgcccctggaccataccccctagcccccacctctttcccctacttatcctcatctcaacagaaccaaggcctgccttcgcactcatgactactaggaggatacttcaaactacacgccatctaccgatctacagccaattcgcccgcccaagcgttacccgcccgaccttctttcgctttcccttcgaacctccctcacgtctcgcaaagtccttatctacatcacatttcaacacaatcaggagtctctcaacatccaccacaatggcctctcgctcaaagcgcgatcccacaatgtattcctttatgaatggggctgatctggtcgaggaacttcttaggtcgaggaacttcttaaggaggatggattcacaacatggggcttcgtgatctttcattgtacgtactataacgactctgactgggagaatttcatggctcgcatggtcggtactgtcttagaagatcttaaggaatatagtgaccttgaatctcttcgataaattcgccctaacgatactagaagaccactcctttaagtgtactacggttaccaccctacgtgagcacttctattagtagaagaagactgtattaaaagaggaacagggcgtaagcgaagactatactctaacgagtggccgataccacttctttatcactgtggactaggaggctatggagtccgttctaaacacccctatgggagggtttgaagaatataaattagggcatatctgtatggttaatgctaaatagaaatggacagatgcgcctgaagaggactctaaggacgaggatatatcagagcctaaggagtttaagccccttaaagggtatactgaggatgatatgggctggatgaatatacgctggcgtattgtgcagcttctgggattctataagatgactgagattgatgactagtaggcgtattatgtccggtatccggagatcgcagacataaattgatatctacccgtgctggaaacagaatttggtatctagcactattaaacagtttcttcaatcgcgtttgggttaaatgagctagtaacatgggcgccgcgctagagcgcggctcagaaggagcgtacggagagatcacgtgacctgaaacacccaacgactaacaattagttgcgtcccagtatagcttaaacaccattccaccatgaaaaaaccagatgacaatggagcgattggggttgccttcaagccataatttcacacaaatacaaaacacatcgcagtccagttccacaggctcagagaagaagtcgccaatggttcagtgaagtttgtgcgaatccaatcttatgtcacagtggagtaaacctataattttgccgttttgaccttgcaaagtcttcaaatatcgctagctaacatacttgaatgtattttctaatatttgtataccactctcgagcagcaatgtttgatttttgaagatggtgggcggtgtgaagccgcagaaagttatgtggtagaactgtatcaggtgaccttcccttcccgtctcagttgtagttcctcgtctacatagacttcaacttcagatcattatatgctggaattcctgttttttttttttttttttttttttttgagaataagtctctgcctgtgaggtagaaatgccgccggatcggggtcgtgcctctaaagcatgcacctcatgcagaaaacaaaagaccagatgctacgagcccggaattcctggacgggcatgtatgcgatgcgaccgacttcaccagagttgctcgctcgtccaaattattgcttctgacgaggaatccgtagcccccgcaccagacacagatgctcggtatcaatcccgcagctcatgtttagtctcaaactgacaagcttctatagtttggaacgtcttgaaaagactgtggctactctgctcgatcggcttggagaaggcccagcaggtactccaggtcatgagtcgagtagacctacccccgtgcggacgagcccgggacctggcgatgcgtacaaggacgcggaatcctccgcggctccgatcatggtcatccgcgatctagcaacggacagcggcatcaaaccaatgtccgatgccagatccctcggggctgtattggacgagcttatttcgcatgatcttgcacttacgcttataacaatgtatgctgcatgaattacttcatcatggcgaattgtcactaaccttttattagtttcctcgatcattacggtcgatgggttctctttgatccgcagtgcgagccaagcgagcttctccgccgagtgaaaaaatcgagcttgctattcagcgcttgttctctgatcgccgtgcggcacacttccgaggaattggctgcaaacttagctccgaagttgtatgaatatgtccggtcccttgcttccaccacccttctagtttccccacagcctatagagttctttcaggccaccctaatcttatctttgtggtcgacaacggtcggacaggtgcctttgagtattgatagctggcttttgagcggtttcgctttacagcactcccattccagcccgctgtttactgctgtcacgactcagtctcatcccccaaacatattggatgaggaaactatggctaattgctatctctggaatcatctctgtcttgctcacatgcattattgtgtcggaaccagccgtcgatccatgctacaaccctggcaaatcgagcgatgtcgtgccatcattgtttcggatcatgcgacaaattttgaagtgcgcatggtggccgagatttatctttactggactgtatatgaacatctcattcaggagtcggttgatttactgaaatcactggcagctttgcaggactggcgacgaaaatgggaatttgtccttggtatgttaatttgacttatatgtttgcgttttcgctaatgggttttgcgatcagagcaaccaaggtctcagtttctctcaatgggctttcacttctctcatctgcttctatatgaacatgctctgaaatccaagtcttcccgaggccgagaaccagttgtgtcagaaatgattcgccattccacggcaatcgtgcaactggccatggatacagtagatgagcgcacgcgccatttgaccgaccacatataccacatgatcacctttgcggcgattgttatctgccgcctactgaatgcctaccaagaacaggttgcctcgactcacaacatcgaggaactcgaatttctcatacgtgacttagtgcagtggatgtactgcattgggttaccatgccatgcggcgcatactttaggaaatatcatcacgaaagtgcaacaaaagctccgaccgcatgtcgagctaccaccagcaaatctgcaaccagacgagctacttggcgaacttaacaattattatttccccgagtttcttggattggggatttcagctaatggggattgggatcttttgtccaatatgggtctctttccggaaagcccatctattccagggagacctgactgagatatcaagccgtttaatatgcgagttagaaaccatataatgcggtaacatagtgacagctcttcaccgacccccataatgcctttcaatccaccggaacagagggaatacagccccagagaatgcaaaggtcaactcgtggcctatatttgcacctttcttgccaatcaaagaagcaataggacccgaataccatgcggttttcatgccaagagcagcaccgaggaacccgaatccgaaagccccgatggcggcccatccgaatggcaaatcagcaatgctgttccaagcatcgaaatcatatccattccatccattccatccatgccggaaaatgaaatgctcttccattaccagagtgatgtggatcacagtccagtacccaatcacactaagcaatgtctgcagagtatccgagaaatacctggctgcacaacaaccaacgactatcgctgcgatgaatccaagagtgaccataatcacacgaggaatgcgcatagcccacggtcctagattctgtgcgtgtagtgcaaaggagtagttgttggggatgttattcttttccaaaaattagcatgcaaatcagaacaccaactggatccataaactcactggaattgagctcaatgccgcaagcaccatcaagaacttcccaaatccccctgccggctccagtgccatcttgagcaaccccccaatcgaagaagccgtatacgcctctttccacgctgtattggttatagtgcctgtatacaaggccgcaccaagagtctgaacaagcacagtaggaacaaagatacccacataggtagcactgaagatctgccagcgcggtgtatccttgggcatgcgtacattataatccgccgcgcaattcacccaggaaaccgagaaggagaatatcaaagccatgtatgtaagaatagcagcagctttgtttgagccctgaagatgaacatggtcctcgctcgtgagctgtgaagcacccgtcccagcagcaacacaccacacaattaaaggtgggatccagatgaatgtgtcaagacgatggatccagttgataccgagtacgcagatgacccagacagccacgcagatcacgatcacgccggcccaaatgggaaaccggccatctgagacggcatgcaggacagctgcgccggagatagagttgattgcgttccaacctgttgtggcgatcatggagaatatgacgacgagcatgttgccccagtagccgaatgagtatcgtctaggattcgggtgtcagttacagagggctacctataggaatacattactcacgagaacgtcgtcatgcgtagtcctgttagtccaaatacggatgtccaggctggtagtaaatcgcttgtgatgttgactaggagaatgacgatgaagcagtcccagaagggaaggccgagagaacctcccaaggagccgatgttgagggtggctacagccatgtttgcactgaacctgttgatagaaaagggatactttagtggtgatcgatattcattcggatatctgtcttaccagaatgtagcagcatgccagaacttggttgtattctgttgtcgctcttcgtcggtgacacgttcgatgccaccttcttcgatggagaatcttccatgaaagaatgattgatgaggcctcactggctctgcttcagactgtgctttctgtatagattcattatagctgttcattttgacgaatggtcgagataaaaagctgaagtgaactgagcaaattgcgactttatgccggggagacactctcctttctatatttccacaatatctccttttttctactcatcttctttccattgatagcacatcagacactgaggtctgcctattagcatccatgattgggcttatctcgcgccatatcgaacacatctcggctannnnnnnnnnnnnnnnnnnnnnnnnnnnnnnnnnnnnnnnnnnnnnnnnnnnnnnnnnnnnnnnnnnnnnnnnnnnnnnnnnnnnnnnnnnnnnnnnnnnnnnnnnnnnnnnnnnnnnnnnnnnnnnnnnnnnnnnnnnnnnnnnnnnnnnnnnnnnnnnnnnnnnnnnnnggctaatccttaccgcccgcggcatcccgcggcatgccggaccgggatgccctaaagaacatggagtataatccacttccctcgatttcgccaaacataaagtcccctacatctgcattacagctcttttcgtcagatcaacttcttcaatcaattgacctgtctacaatggagcagcacacattccgccgccgaggcctcggtctccgcggagtcgacgccgagcgcgtctcgccaggctacgttctatacgcacctctcacctcaaacacagcccacctagtctccacaacaggcaaagaagtgcaccgctggacgctcccccaccgcagcggccgccacgcccgcatcctcgcagacggcaacctcgcctacaacggcgcgcacccagacgcccccaacctctttccaatgtgggcgaagtaccgaggcggcgtaatgatgcaagtgagcccagacggcgaaatcctacggcaatacagcgaccccctggcacaccacgaccagaaccacctcgacgacgggacaatcctgtacacaacccttgagccactcagcagcgccgaagcagcgcgcgtgcaaggcgggatcccagcaaccgaagccccaaacggcatcatctacggtgactgcatcaaactcgtccagccgtggtcaacaagcaacacctcctcctctgcggacttcgacggcagtggcggtaaaacaggtgccaagctgctctggtcgtggcgcgcgattgaccatctcgaccctgctgtctttgctgcccatccgcactatacgcgtgaccactggccgctcatcaatagtgttgcgtttgactcaaatggggatatcattgcttcgtcgcgcaatgcgtcgagcgtgtttgttattagtcgggctacgggtgcggtcaagtggcatcttgctgcgccggttgtcagccagcagcattgcgctcatgagattaacgaggcgggagacatgttgattcttgataatggtgtcttcaggcctgggatttcggtaccgttttcgagggcgattgttgtttctaaggagggggttgtgaagtgggagtataaggatttttcaaccggagggctgggattcttcacgccgtttatggggtctgcgcagaagttgatcggcgggaatgttctgatttgtgaggctgctagtgggcgggttatggaggttactgaagggggtgaggttgtttgggagttcgtcgtgccccagctggggaactataagcaggttatgaagaaagaggagttggaggagatggaggcgattgggtttgattatcttagcaatgcgattttcagggcttataagtatcgtcctgaggaggtgccttgggttaaggaatagcggagattccagggggctgagatttgatatgcgaaatcagatgtgactttctgattgagtctgttgtacatagcagggtaggtggttttttcatgttctataaaaaatatatatatcggcttttgtctaactggtggtgatacaaggtgtgtacagagagagtctgatcaagtggatggatacatgagaactgagacaaaatgaaatagaagaatatgtggctgagggctataagacaatgggaatgaaaagtgtaaactggataacgaaagtaggcgtatcaggcgaggatttacgttcaaggtttcaaccaagtgattcgccgagatgggcttcagcagacggaaagactgtctgaatgccaccatcttggacggctcgagcttcagtagcgatttctttgctggcagccggcttctccgcttgcttggcttgcttgggctcaggcgccttgtgcacggaagcatacttcaagaagacgatgatcatgacttataatcgagttagctatacgaaagagccaactaggaacaatggggcacttacaagcacagatggcaatcgtcgaagcagcgcgtctagtcaaaatccatcgaagaccttcaatctcactctttccatcgctgttaagcgacacggtgatcttgtagttcaattcctgaaccgaggtgtcgatggtccgctgcggttctcgcgtggacatcttgtggtcattgaacatgcccttgatgtcgtctttcatgcctgaaagttcctggctgagacgctgcgagataatatccgtttcatgctgcaattgcgtgcgcgaggagcgctggtgctgtatttccgagttgcgagctgtctggagcgatgactgaagctcggagcaggctgctttgaacaggtattcttcattttcgacatcagatttcgaagtaaggctcgccctagccaaagagaggttgttctgcaggatagcccgcacagccttcatgattgtagtagactgttcttcgctgtagccacctttggacagatcctgtaccaatgaatatgtgtcgaaagggtgaacatacggtgctgcagacaaatgcggcgggcgatcgtcggacgaggagggttccccggttggggttagaaacaccgacggcgagggcatgtggaggacatcctcaaacggagtttggtttgtggatgaagaggtatctgtactttcttccgatggggcttcggaagcgggggacgaagaggccgaagcctgttcctgttcggcgccgtctatatctttggcctgctcctcgcgcggttcccggtccgtcggagggttgtcttccttgtcttccttgtcttcctttgtttcagcttcggttggttggtctgcgttccgttggtctgcggtcggggtttccgaagaagtgacatctgcattgttttgctcggcttcctggggcggcggttccgactgtgactcgtctggtggagcttgcccctggtcggaggcatttacaccatcatgtccagctgatggatcgcccggcacctcctgatcgtgtggacccttcttcggacgcaacgaatgagcagtattcggttcgacggcaggaccatatcgccgctggtaggaagcacgctcctgttgctgactcgtatggaagcgttggttaagccggtatggaattctaattgaacggtatgttctcggttcgcatgatcgcaccgcgcgcataaaattcggatacaggaacgggagcctgggtgtggccatggtggtaaccagcatatgaagaagctaaagtcttttccgcggggaataatcaacgtcactccgtctccgggcggtgatgtatggttagtcagctatacccgtccgcgggtcgggagcttccttagctgagctatccgacctcggaaggatctgattggttgccggtacctgctgtggttactattaatatgtacggagtacagcttgcctatatataggttcctacaactattctagcgaaaggaacaggcctgataaaacgtgtatagcctgccggggataaatttcgacggactagcccttttgcaatcatcttatcccaacgccaaagccaataaatgagggtatgtagtaggataatggtctgggttttcttatactcagtatatgacgagaatagtagcagtgtgttctactatcattacttgacagtctacatagatataatttaaaggatgtaactagatattgggactggtggccgattttgggcattccagagagagatctactcggtcctattacgatccgcatgattgtctatcatcaatacgactaggtacgcagacatagccctggtccaaccgaccacttacatgcaaccgctaacctaattaggcatctggatctagataatataaaaaaagagtatgcatatatgtgtaaaagcgcaactaggtatatatatgtatagtcattgtcggcagatagagtacaattcttcttgcagagatctctgtgaaacccttttgtttgctgcatatgagcagccgtttgttgtagcatctatgaaggctacccactcagccgcatcggaatactgcagctttcttctctctactatctctgatttgatcaaatttcagacccagcatggccgaccttattccaatcatttcacaaatagcttattgaccatctgacagaccataataaagatccatagtatctctatctaggagaagaatatacgagtaattgaatagagggagtaatatgaagtttggacctcacgtcaacagacttagacatcagacagctctgtaaagtcatatgtctgtttgcaatacaaggatgttgccctttatgtttccatttatggatgtttgtgtttgtttgggacaaacaacgtttagggaaagagcgactaatgaagaggcatctccaattcgggaaggcacgcgtctggtcatttgacccccaatctctcctcttccacttctctctctcctctatcgacttgtttacctcttcggtccacctcgatcttggtcccttcaagctatcaattgagacggagacgaacccattgtcttgtcttggcctggctttctaaaccataccatttcctgtcctaatataaatcacattaaaatcccccaaaaaaagaaacatccttcgccaggcgtcaggcgcgtctattaatccccatctgtgtcgaccaacttctcggcccataaacaacaagcattgagccttatcacaccacaatggcgtctgtacagactccgtggacctcaattctgcttcaggaaaagcctggtctacatgaatacaatcatgccctgtcgaatgtcgaaaaatactacactcgcttgcagcgagctatgcaagatgaatccatccatgatcaactagttctcaaccccgaccaaacacactcacgtctgctgaaatcctttgaaatcttgcgaaccaagcaactgcccggccctgtcgccgaagagatcttcaagaccatggtacttccattcattcacgacaacatcttctcgccgccgcagatgattcaactcgttggatctgcactacctcttataacaaaacaacattctcaattcctgcgagacctcgcaagcactctcctctcttcacaaggcttgttcgatcacctggtggccaacgaaaattacacagtgattctgaaggaatggctgttctcgaaaagaacccgtctttcccttgctctctctacgcaggttggagacaggttggttgcaatgtgcaatgcctgttccgctgatcatggaacggaggctactgtagagagttgggggattgctcaagaactgatggaatccatcaatgcgctcattgactcgtcttacgaagaagaactgaaacgggcaaaagtggaaaatctacctcctctggaatcaatgaaagttctcagtcgggacgataaaaagtcaaccctagttcaacaaggccccaagaaggaattgaaaaaggaattcacggtctcggacgaaatcctgcagcagatggaccacttcaacatcctaccaccattgtccgctcgaggcctcacccatgcagtggaacatcttcaaaatgagattatcccagcactgatgcgctctgccttggaaagcttcccatgcagaatctgtttggataggctcactaccgggagccttacaggtactctagccaattcgacagacctgccttcagatcgaactacagcaccgggcaatgcccaagatattttcggcaagagagtcggcctttggaaggttttgctgtccgacatcgctttcaagaatataaagaaattggttcacggaggtaagtttgatttctttcagtatgtgcaacttgatcgtttctaaccgcatctaggcgaatttggcggggtggaacaaaagctcagagatttggcaagcggcgaatggaaaggcaaagatctatctcatcgtgtgggatctaaacagcagaagaaaagaatgcaagttcctattttggaagtaagcgcttctgcaactgtgtcaatgttgtggcaggttgatgttggtttttacgatgagcttccatgggtacagcagcagattgtcaaaggtaaataactacctcatcgagacttccggatatatgctaactttggcagtgtggcaaattgtgacctcggaagaggaggtatgttctaaacccaagcatcatgagaagtctgctaattaggtttcacagttggaaactgccattgagcatatacttttgatccaggaaacctacacctctgaacttgttaaactctgtttagaacgtcctattcaacaatctgatggaacttggacgccacagcggttcggaaacgtgaaagagactgggtcttatcggatgaaatccattgcttcttccaaggcaagcccagctttgattgagatgtcaagtatggggttacccccgtcagtcccattgaaagctggattgtaggctaaccatgagtttccaagacaaattttacaatctcactgagccgtttttgaagtcgatcgttgatgagaatgacacagaggagtttccgttcgatctctcacccgaagaattagaaattgtgaaacacttcagcacatcaaccttgattctaggacgaagtggtacaggaaaaaccacctgtctgctgttcaagatgcttgccaagcataaagcaagacagtcagcgtcggatgggcagcaagcccgacaggtatgtctttgtctcctcacaatgtcagatgagaaactaacatgaatagcttctcttgactcgctcctcttatttggcttcaaagcttcaaacatatgccaaaagtctgatagacgctcaatccaaggctccatcgactgaagaggatgtagactcagatctaagaccgacctccttcttcgccctgaagaattggcactttccagttgtctgcacttacgacgagtttcttgggcttctagaaaacacaatcaggtttgaacatctaatgccaaacttttcaacattttcccactaactgaagtagaatggcggatcgaaaagacttcttaagagacatcaaccccaataagacaaagggcctagaagtacaagggggagacaagccacgaattattgacttcagtattttcaaaacagaatattggggctctcttagtggattagccccaccatcttgctctccagagcttctcttcgcagagatcatgggcgttattaaaggctccaccgtcacggcaaaaagcctaaagccgttatatcgtgcggaatatgtcaagaagaatgccaaagcttctcccgcttttacctctgaggcagagcgtgagaaggtatttggagcttttgagcgctatgaaaagcaaaaaaagcttcgcaaggagattgacgagttggaccgtgtcggtaccttactgaagtctctgagagataacaaagctctagcagagcagatccaacgctgcttcgaggagatttatgttgatggtgagtctagttctcaacattcgagagcaaagtactaactatgtgtttaagaaattcaagacttacgttgtctggacattgtcttacttttgggttgccttagtgacgcccgtgggattcaccttggtaaggtctcctgaaattcatttacgagcttaatcgactaatataacatagctggtgataccgcccagtgcatctcaaaggactcggttttccggtttcctgagataaaggcttttttctatgaacattacgagatcattgccaacgaactaaatcagccctcatttgccaagcccgttcaattctctctggctaaaaactatcgctcgcatcagggcattctgagttttgcatcatgggtgatgcagctactctggcatggtatgaaagactgcaatgatcagacttgtttctatctaacggtttatgtataggattcccggaaacaattgacaaacttgacccagagattggctacattggcggaccgaagccaattatctttggtatgtcgtatcgcatcgcttcattggcactcaatcactaacaattgtcgcatagcgggatttgactcctccattctttctgccaaaatgattggtctggtcaagcttaatgacaaggtcgccgacttcggcgccgagcaagtcatccttgtccgagacgatgcatcaaaggacaaattacaaacccaaattggcgagattgcccttgttttgacaatcctagaaagcaagggtatggagtttgatgatgttttggtgtatgacttcttcggcagcagtggacttggcagtagctaccggtgcctttacatgcttgtccaagcatcacgagcgcagtttgattctcaaaaacatgcggtgggtatattccatgagataatcagcccgttatgattgctaacattttcaaccaggctttgtgctccgaacttaaggtatatctatctctttgctaacaatagttcttgctaacaatattaaccagtcgctttatgttgctgtcactcgagccagaaagcaactttggttcatggaaacccaagagaacagcgttgatcctattgtgcaaacactctcacagagcaacagcctcaagctcgctgaaattgtgaagcagaaagaccccaatgtaagtgatattctaattaaaatggcttgcatactaatctctttcaggttgcggaaaaggtcatggttctgcgagccggtggctcagtggacccagagaggtggcttaagagagcagcacattttctccatcagaagagctttgcagaggtaatatactgctcactggctagaggagagcttcatgctaataaaagttgaacaggcattgttcagctacaagaaagccaataattctcgaggaataacacactcgcaggcctgtttgtatgagcaagaaggaagatcccaccgagcagcgggagataccgaagaatttaccgtatgctatgagaaagcaatcgctcttttccttgaggttggtcttattacagaagcggcgatgtgctacgagggacttggacagttcggcaaagttgcaggtttgtttttcaatcgtcaggtctgagaaatactaaccccctttctagaaatctggaaggagcgtgaacaatatcaaaaggctgcatctttctatgagaaaggcaattttttcaccgaagcttcggagtgttatcatgcttgtggccagtacgaggcggcaatcgaggtcttgcgccgcggagaccaatttgatgaactcgtcgcctatgccaacaggtttttacaccgaattctctctgcaatgattacacaatattaactctatatagaaaccgcgagtatcttagcgagcctacattggttcgttattcgagactttgcaatatcttgctgaagcagggacgtgtctctgccagtctgagggcaataaccatcaatatgcttggatcagatgtgtccaaaattgcctttttcaaagagtttgaaatgtggaaccaactgtgtacactctattcatcaaagtccagatggtttgagtattatgatctatcagtggctgttggtgacattcctgcggcgataagcacattactggttcacaaattgacaccagtagtcgacaagccagttgttgaaaagctgtttagctattccatggttgaagtcttgtacgcccacagggacttaattccgagcaagcctgagcgagatgggctgctgaaatcagcaaagtcaacttatctcgaaaagcttggggcacagtggaaatcgctattgctgttggtcgacgattttgaggatgtggatttacccgcgtcagttaaaaccctagataagggtcttgtgaaggatatcttctgtctttttgtttgttttcaaccgagccatcatctgtgggtagtgcactaattattttcaggtgattgctttcgagccgtcaatattcaccaagcaaaagaccgaacatcttccgatggagattgtcatccgggttggaaaactgctgcaagaccttcatgctcagaaccagtactccattaagtgcctggctatggcttgtggtatttttaccaatccaaaacaagagagccatacgatcttgctccactggtctccattgaggacttacacagcaacgcctcttgatggttcttcattccagaacttgattgacattgcaaaaaacttcattcaagagaagtttaccgcagcacttgctcagttccatgaaaatgcactcagtctcacgaagagggattttctgccgacatgtgtccatcatctctacaaaggtaagctatatccgttgacgctctcttagggaaatatctaacgagttgaatcaggattctgtccaaagtttaagaccaatgaatgctcctggaagcatgagaagcccactgcagaattcgccattgctaagttgaatgtaagtaaaacaccaagaattaataattgaccaactaacacctagttaactcccgcagtgtcttctcgctattgctgaggtttttgcgcgcctcacgcctgtttattaccaaagagtcatgggcaaggctttcaacaaaccatttttgggtcgtagtaagtggtcggtccaatctcgctgtacgtttcagatctgacatactatagggagaatctggattcaacagatccaagaggagcttgtgattgtcagttcactggagcaatcttctattgcaattacaaatctgcgtttcaacttgcagagcaacccagagtttgctgcgaccgcatactgcctagaagacttgctgttctatcgcatgaacactgaatggggctcgatgaacagtctgagctcttctctagagaaggtccaagaagctcaaattctcggtatggtgaacttcttgttctgaaacatcataaatcggctctaataaccaatttaaacctgcaggccctcacccagccacgcgttttcagcgagcacttattctgaatatggatcgcatcatgccaccacgccctagacgatccggccacccgctcgcgttacctttgacaacgttgaatgctgctgagagaattcggtcagcggttggaagacgccacggtcaagattttgtgagagatgagtctacattacgtatcggactacactaacctttgtatagcacaacggcatcaacacctttatccaatgcctcgagaagacacctaaatcttcccttggctcgctccatgctgttctgtctgtgttcgagtttgcagctacgtatattgtgtgtttccaagtctcgttgatggtataacaggttactaacattgcacagctttacatcgccaatccagggaagggtatcgtgattccttggtcctgggctttgcagcatctttcaacaattatgcaatctcccgttaaagactatctgttcaaggacagagagatccgagtgcacataaccgacttgatgcaccttgtcatcagcttctgcaaccttatggagcaagtcgaaaatgccttcaccagcggtgctctgaagttccaaggactgggccgcaccagcctcccaatccctattgtcaaacggcgctgcaccgagcttttgaccaccgtgaatctcaacctaaatcactggcccaaacagccaattggctttaaggatatggagaaggtggtcaacaaggtatgtgtctttgcttatgacaatgtccctaaaacaagcttgactaaaacaaactagacacttcgatcaacccttattcctccgggaatggcgctagaattttctaacagtgataaattccggcaaagttgcatccgcgagtttgcagcctacaaccgcaaagatgagctgtgtgtcattgcgcttgacgatagaaagtccgctcctctcttcttgcgatctttcacacaaggaaacgtgaaatttatccagctcagtgatatcttgaaaatatcgcgcattaccgagaaccaattatccatgggtctggaagaagactggcaagttgacgaatataccggctacgagctcgatatgatcacgaaccttcagcgacgttggcgacaagtgatggaggtcatcgagaacaaccgccatagggcacaatctcgcgagggcaaacttatccagcacttccatgaggtgtgcacgagacggatgagcgttctacctgcggccgcttggtcaacccgagataaaatacacatgcgcaaggtcatattcaccgaaggcataaagatcgccatgtctcttgatggtgttttggacagtttccgacaactgaatgaccggtggaggcaacaattccacagcaatttgtccaccgcaaagctagaggagctctccgttattcgcggacgtgttctgccaatcgatgggcaacttgagtacatcgttgagcactggtctcttaagggcattgaggaaggtatgatgaccgttccggcggaggacctcggtgtctcagcccgtgaggcccagcgcgctctctgggctgttcagcgcgagattgaaatcattaaatctcaagttgagatcattgcgaagagccctgaccggtaagggggtttcttcccttccatgattgttcagcagaggctcgataaccgaaatcggcaaaaaaaattgaaaacgaaaaccgtcagcaaaaaaaaagctagttagccggggagatctgtgtggaacgaggagaatttcttaatatctggctccaaccatcttatggctggacgagacacgagacacgattgtatgaagtgaaatgtatgatatcttgtttgattactctgtaatggattttgtctgcgtactatgtaatcggtgtactttctaacagaaaagttacattcaagtacagtatatatcctttgcttgttgtattatataatgtaaagcatagacgggcatttggcaaaatacagcatccttctagataaccactcactgtcttgccaagaggccaaacagcagctccgtccgagtccaatactcagccgcaagcttcttgatagtcttaacagtctccgcactagaaccagcgctcttctgagcacgctcgacgacaccagccagctgatttcgctcgccgagcatctgagacagatacagagcgtcgaagaagagctgcaccctccagtcgcgcaggcccgcgacttgatctggatctgggctttggatctctgatttctccgccgatttatcttccttctgcttatcttcattggcagtggggtggacgtccttggtctcagccttgctaggggtattttcgctgtcgagatcatccaaggcagatgcgatagccgcctcgagtttcgttttcaattcttgcttcaacgcctgcacggtggacggatcccataggtctaatccgcacgtatccatcgaggaagtgagacggcgcaggagcttgaagctcgaaaccgagggctgaacaggtatggcaggctcgccttcccagagtgatcggccaggcacggtcttgatcttgcctgtctgggggtttgactttggggatgggatcaagctcagcgagccggccttgctgactacttcggttgcaagcagcttctgtaggtcagggacgatttcgctcgagaagacaaagtctccagatacaaagccagcggggatatctcgccggacgagtcgtataagccttagtaggaaggtggctttttcgctggaatacgaggagttgaatgacttgaaagcgctgctgaatgatgtttggagactgctgaatgcgtcccgaacggcagaatgcagagaatcggataggtgtagggggtcatcttcgttgagtcggggtgttatgtcgatatcttcatcttccacttcacctccaacgagaatgtcagtccatcgtatacggcgtagagagtcgatagattcgttgactgcttcgattgatgctagccatgcttgatacttcataaggacggtagagacgtcttcgtcacggcccaataatctgtctactacggttcgtttgaatgcctgtgcgccgttcgtgtattctgcggtaatgagatcggaatcccacagagatccaacggagttgtgttcggtattctcccattctgatatcatgtatgaaacttgagcaccgacttcgcctaggctttgtgcttgcgtattcaggattctggcaagctggttattgaagacatttcgaagactttcgaggacattcacagagccgtgaatgatcgttgagccccaggacgatagccacagttccacagtctctgtgcggagcgagagaagctcagagaaatcggtgctgtggaccaagctcttttggcagccgtcggagaatttattgaaagcttggagtgaccattccttgattgattccacaccctgggttctgcttagttcgctgagcttgatccagggggtgaaattcttcacatctggagctacccagcggccaagaacttcgacctcgaggccatctagactctgaatctctgggtcggagaggaggggcctagctttaagtttcatgagcacatccgagaatcgatgcgatcgcaagacctttgaagcctgaagtgttcggacgaacagctggagggctctagggatgttctcacgagatacatccaactggttaacaatgatgcccaggcgcactcggtgaaagcgatggatcgcatcatcggaagaagggctctctacaaggcaataggcggccaatgattcaatgatagtgtcttccgtagcgcttgtagaggcaaggcgtttatcaatccgtttgataagtgtctgccggagggacgctagctggttccagagatcatcgaggaatggagggactgattcatgttttgataatgtcttgtgcagtaaccgcgagacaactagaatcttcgcaatcagcaggagcgagccgcgacgtcgcaaaagccggctgatagaggttgtacagcggtggaggagagaaagctgcgctccgaatgcgtgcttctctgcgtctatatccacattatcagctactagttcctgatttccgccagaactaggttcgtacctttctcatcatcgccagtttctatttgccggacatgaacatgcttcctttctataagccgggggttgcaccggcgtccaacatcggccagaatggattccacgccttgaatgtctcggttcatagccacaatcgtctcagccgtgccaactaagtcacgatatcgtgtcctataatcggataatatacacattagcgaagaaacagcccctatggcaaatcaatcacataccccacgagagctcggagcttctccttattgctcgcgatgtcccgacgcagctcctgttccacgcggcggacagtgggaatggggtattggaacgcatcgtgccatgatttcaagcttgaaggatcaggcgcctcaggggccatgctggcgggatatgtggtgagaccgttggttcatagagaacaagtaatccatgcgacaacggatgcctgacagccttagactcctggctagctcggtcttatcgttatcggcacgtgatggcagaaaaagtcccccgccaccgaggggaaatccgtcatcgttggacggaccgttttataccttacacaacttatattcaatatgccgttgatcgaatcagacgctgctgtggcagagacatcatccaccgatctccctgatcgcctccctttccctcccacgacatactcccatatcttgcattgctcttatcatgactggcatccgcggtaagcttccatatgactcaacaccaaacatatctgaccgaagtcctaggtaccgcacacttgccccaaagtcgcgcgtcattcctttgactgctccttttgttgaatacctccgcgccgacggcattgttcttccgcccgaggccgttgccccaaccgacgatgataacctggacacattctccgattcgggcgaggaggagcacgatccatctacagcatggcaagagattcacactaggatcaaggataccatctctgaactcggtggcatcgtcactccgaaattaaactggagtgctcccaaagatgcaacattcatggccgccacaaacgacacccaatgccgttctccgaatgacatctacctcctcttgaaaagcagtgacttcatcacccatgatttggatcatccctttgacgactgcgtgccggatacaaccagcgacgaaccgacgccatccaccgttgactcaccgctgccggatgtgccgtattctctggtactccgtaaatatgtcaacttcaacccttcgctcgagttccgttgttttgtgcgcaaccgtgtcctgctgtgcataacccagcgcgatcagaaccacttcgacttcctcttccccatgcgtgatatgctccggtctcggatccagtcattcttcgatgacaagctcaaagacacattccccgaatccaactttgttttcgacgtgtatatccccgctccgcaccagcgcgtctggttgattgatatcaacccgtgggcgcagcgtaccgaccctttgctgtacagttggttggagattctccggatgaaggatccgattggtgtgcaggaggaagaagacgatggagcggaagagtatgtgagaatctcactttctgatggtaagatcatctctaccggcacggcggaggagctcgaaagagaagattattcgggttcttccgcctcggaagatgagcacgagggcgccgaaggagatgatgaacaggcccccttcctcccggaattccgtctcatcaaaaaagatgatcccgaagcttatgcattcagctccactcagtattcggctcacaaggtgccgaaggagctggtcgatgcttcgcttcaggggcctggcggcatgagtgaattcatgggccagtggcaggatatcttaaagaagcaggagcaagaggaccaggctactggcagtgactctgaataaacaacttcggctcaaaacgctgcgtggtataaaagcatgcattcttggtttagtggcgtttacctatagcagggaaattaatactgtggattcgaaggttttgtcgtggactacaggtcaatccacacattatcaataaatgaaatcaatatatgaaatcaatatataattgtcgccattggtcaattacctacatagaatgtgtaagagaaggttatatgctatgtcatatcaacaactccagtattgtgtgtattacttctatccttcgtcttgaagaacaaaatatgtatcgtcctgtatcattatatcgaaaaatgaccccgagcaagtaggagatacagccgcaagctctagtagctatatacaaaaaacctatcaagcaactaaagcttatgccttttctcaccagacgccaacctccggaactcttcctgcgggaatcccttcataaagcgctcaaggcccataaacgcctcaagaccattctggcgatccaaaagctccctctcaggccgccttaccagctccttaatcttcaacagactagtctggttcaagtgcgtaccaagacgatcatcaacctcctcaagcaccttcttcaagaacccatcagagtcatccttctccccggactccggcgcaataaccttattgacaaagccagccgaaaccagctcgtcacaggtgatccgcttgctcattaggagcgcctcattcgccttggcgatgcccaggcgctcaacgaaggcgcggctagcaccgccttcggcgacgagaccgagcgaggagaagggtgtcaggatgaatgtgtgtggggcagcgtagatgaagtctgcgtgggcgaccagtgcggctgagagaccgacagcagggccgttcaaggcgacgacgagaatcttggagtggttgtagaaggtgcgagtgacgtcgacgttgtttgcgacgaagcccttgactagctcgcggcgctcgtttgagttactatcgtcggggcctggacgtatacttgtgacgtcggctccgctgtagagaggagattagtgttagatatagttgatcttgtcaagctttcttttgggatgtggtttcgcgatatctagggctggattggggctgttgatgacatacgctgagaagaaacgaccctttccggtcaggactgtaatgaagatatcatctcgtgagtcaatctcgcgtaaacgctcgcctagaaggtagtataggtcggcattgagagcgtttagcttgtcgggccggttgagtgtcacgatcgccacgcgagcctggtaggcaacggtaatgaaactatcgtttgacattcttactgtatattgtagaaggaaaccgttcaatgggtcaccaaattgaactgtgattgcaatggtctatcatttatcagtcgtctctatgggatatcagggcacgcgaatttgcggggagccgaggcccgcgggaacttactttgttctgcctgagtcagcagaaataagcatgtatgttctgtttgtcctgtttgtcctgtttgatcaaatccaataatcacgcccgtgactggtccggccatggcaccactcggcgattaaagattgaagatcaccaacctacacaatatcgctgccccggtctgctggaatcaggcggtataatcaactgagcacatcctaccaacaacatcgaacctcaaaccccactcttagcaaacccgaagccaaaacacgccgagaaaaaaaaagcaacgcatcagactcatacaatgtcgcaaatattccgcaagttgcagggaggcaacctcgaagtcttcaaggtgcgtatctgacactcaagtcctctgagcgattattcccacctaccgcctcccaccgcctcttcttaggactaaccgagtccatgtagtttgggatgtacgtcctcttcccgatcggctggatgtactatttcggtaccaacctcgacgaccgcttcgccacgaagaacttctggcccactgccgatcaatcgcacaagatcccgctagacaaggacgagattgaccaggaattggcacgtatgcgcatggtggatgccgtgaagcgggagcagagacgggcggcggaggcacaggctcaagcgcaattagaggcacaggcacaggcacagacgatgcagactcagcaatgaggctgcaattagtgggtgtgattgagaggagctggcgacgggggctgaaacacaacatgcgctcattgcccaagtccccgggggagaaaatggcattgcgaaagggccactggtgttccctttggcgggttgatatttgccggggacaacattggcatcgcgctgggaagttacacatgtgctgatgatgggtttacttgtacaacactctgctctgggcatcgagggcgttctggagttttcgtcttatatgtatgttgcgttttcaacatattgctttctactatttacatctgcatttgctgtacatcattctggaaaagtgtgcaaaaaatatcaacttcaatcatggccacgttgcaacgataatacaagctggcatcatcgaccacagaactctgccaaggaggcatatctatatacagtgtggtgtgaatgacccaagaaaagaatgtaataattaataataatgtaatccgccgcactccgacaatgcaagtcataggggtgccgccagttcccagaacacaagaactccaaacaagcgccggccgacaggaagagtgataacgaggttcccttcgatatcgatatgcaactccaaagggattagggctcctcacttttgacaatagagaatgcaactgcaaccattatgcgggttttattcaaaggtcagccaagcgctcggtcgaggtggcagcagcgttctttgccgtctcgtacatcaaatccccgatttgcgtggccacgccattttcgccaaagaccgaactgattgacaaccgaccggagctgaacaggcgctcgccggcccagtagtagtaaaggcgcccgtaaatggcgagaaggtggtcgggaaggtaaatgtaagtgcccatggctatcatggcaatgaggccaaggagcagcgtgtctaaataggaaacgaaaggtcagcatggtgtaccaagagtattgtgaacggggaacaggcgcaacatactgaagatgagcttctcgatcggagtaagcatgtagagggagaaggtcacctcatactggtagatcttcaaccgcatccagcggaagaggctagccacggcccagataatgaagtccaccattcttgcggggtattcagagaattgtaggatgctccagtctttcgttgcttcttgcggcttctggtgccgttcgtttgaatttttttttctctctatagtctgagcaagagccaccaatgacaaactcgggaaatagacccggagacagtcgtatcagacacgggcaatatgtatgcccggctggagtgtggtgttgtgcagggaaaaatgatccacgatgttctaaatcaacgcggcgcggggaagggttgacgtaaggtcgcaagataccgtaggtacttaggcaattgagggatattcgttacaatcgggaagagcgtgttgacagagacgttggggttgataggagtaaggaagagaggataagactgaggtcacgctttttggtggactgtgctcaataagattccccttaaaatacttctgttttggttctgaaaatggctgtatattttgtttatttcatgccgttttggtctgagatatatggtaatatcagtatgcactagtaatagcataaacctcggctggtcgtctttagtatgtctacagcactctaatttttagaggtttttattcaatgttctaatttcattctttctcgggttagataggtgtaatttatgtagtacatatgtatagatacctgtaatgtagtgataaaggggaaggtgggagaaatcagagtgaagtaaagtaaatttcaggcattaacttgctctttgcggaggcctaaggccaccaaccctattgcctgatcatttgtgttttccgtgttttgccgtgacaatttgtatccagtacacaactctgacgctattccacacgcgagtctcaagtactcgatactttatgttttatgcacaatctgtacaatttagatgtcccgacattggatggcataattctctatgcatagcatatgatttatgtacacatctgtctgtaactaacctatgtattctaagcattactttggcaacaatattgagcataacaaactagatgtactactagctaacagtctcatgtccttttgctaatcaggatgatttgcccatacataagggcatggtccatggataactaagtgttctactattcagacttcctagatctcatttatccagtcacagtgaggaaagcttataatactcactaccatactactaaacaacaaaaacagaaatatatccaatagactagaaagagaacctccatttatctagaataccaagatcatagcccttgagtcaaccagcaaacaacccaaagtagccaaaaaaattaccattcaagcttatcttatcgcaaacgtcggcaataacctcaaccttgaacaaaccacagcacgaacaccaaacgcaatgctatctcgcctacgctggcggacattgtccccaacactagcagccccggcgcgactcttcagccaaacccccatcatccccgagaaagccctccccccacggctcaagatcaacgatgccgacatatcaatatcctacctaaaaggcaccgggcctggcggacagaagattgtacgttttaattcccaagcagattcctagataagaaccagaactaacaaaacctagaacaaaaccaactcagccgtccagatcatccacaagcccagtggggtggtaatcaaatgccaagcaacgcgctcacaggctcagaacgcgaagattgcgcgctcgctgctcgctgatagagtcgaggcgctgcagaaaggggattctagtcgggttgcgatcaaggctgcggcggcgaagaagaagaaggctagtaaaatgaagaagacgaggaggaagtatcgggaacttgcggagggagagaaggagggggaagtcggtgaggaggaagaggacgaggttgagataatatgggatgatgaggtaaaggagggagaaaataaggaggctgaatcgaaaattggaggtgaggccaaaacttccgaagagtctggaaagggtgtgtgatgtgagatttatgctgttatgtgttttgggatgtatactaggtctactgcattggtgtttgagcgtttacttttgagagatttacattcccgtggatgttcttctaatggaaaatcaaacaaacatttatttcatggatctagtgtctcatcgcaacatgcatatggtaatagggggagtggggaaaaggattattcctccgaaggagaaagcaaatccatataggttgaactttttgagttggaagggaagatcatagcaaagccactaagaaatgtaacttgccagcacggtctttgactggtcgtcaagacgctcttgggcgaattgcgaaatacggccactctgcttgctatcggcttctttcaagtacgagcccacccaagccttgaggtcagcaccagtttcgggccatgggtccttctgctggacacggatggtgttcagaggagtaaatccaacaccgaaggacatgtcttcgatatctgcatcattaatgagatcatccctggctgcaggcagcggcggaagctcgaggagcttgagcaatgccgtgcaggtgaagccccatcccttctggctatagcgagtggcaaaggcctgcgagttggcaagggtcttggtgaaggagatgatagctgtcttgcgatccaaaggccgggcaagcttctgggtttcaggaagaatgacgttgatatagatgggagtgaagagtctagacattaattagcctacgaccaatttatactgtgtaagaatacatacccctcttgcaccttgtcggtgacttggatgataaagtccgcgctgtagcccttgttatcctgcgccgagaggaagtggaagaagcggacaaagcgaagagtcaggttctctgtcttggaattctgcagacgttgaagaatgatctgcataatcatgacaaagtagttctcaagggcagttctaggggaagggaagtcaggtaaccaccaattaagcgcttggaagatgtgatacgtacggtgggaagttagcaacaactgtctccaggagatcaaagccaaagctctcattggccttggtagaaactagtttttggaagataccaaggatgggctcgatctggttgtgttcaatgatgaactgcgaaccacgcggaatgatcgaggaaagtagccggaccaaggcggggatgtttcccttcgaatcccacataacaggcatcaggatagggccaataagctcttggtagtaggtgggaagggtgccggatgggttggcctcgagcagcgcagcgaagagctggaaaacgtagggcatgaattctgaaatttgtcagcaagggatcaaagatatcgacttagtttgatttagctcaccctgcacatcattctgaaggatagctgcgaagggcgcatacagcgcttgctcgagcttgtcaggattcgcaggagcagcaaagctatatcacgttagcttctagcacttggaaacgaaaaatgcgggaacataccggatgaaggcgcccatggcttcgaagtggaagtagtaaaatcgggggttacttgggttcgcgctgatgatattggtaatattaatgaagcgctggaggacgacgtccgtgaaaggcaccacgccctccttgatgacaaccaaaacccgcatcacacaacgcatcaagaactcattctcttgcactttttcaggagctggatcactctgaatcagctggaagatgtgctcgagaagatccttagcaagcggtgtgatctcagtgggtggaatgactgcctgtccttggctgtcggtgaggaaaagtactcgctccaaggcaatggcagcgtaggtatagacgacaaagttcgacgacgccaggtgcttcaccagcacaggtagaacctgctgccactgttccttggtgatgatactgcggaaagtgtacaaatacttgatagcgtcgaccttcaggatagggtgaacaccatcctcgttgatcagatccgcggcgaggttctgctggaagtaatccgtgatactgaccaactggttggtggcagtgacaccgtgcgaggaggtcgcagtgcccttggcagcgatagcggagtaaaggtacgtcgctgtgtccttggccttccagttggatgaatccttggcatactctgccaggtagtgctgggtatacttgaggacaacctgggtcactggctcttcgaatttctctgccagcttgcggaggaaatcagtggcagctcggcgtctggtctcgctatctgacccttccaagtcccgtcgaatgaactcaatcggctcgtcctcgaagagttcttcgtcggactcacggaggctcacattcggcaaaatgaccttttcaacaatctggctcaaggtttcctcggcctggaaagaagcggcatgctcgggcatacctgcgacagaggtcaagaagtgcagtgctcggctgaccaaaatatcatacttggtctcctggccgatggtggtgaggaagttccatgagctcccaatgaattgtccaacgtgaggctggaacacatccatgtacttctgcacgtagagagtcaaagcctcaaatattccagcgcgaacatattctaatagaccagcctccgtatcgtcgtcggtatggagtaattgattgtcgtaggtcaagtatttgaggaagattgtcgagattccggtgaggttgtcttcgaacatgggagggagatcgtgggaggaaaggtcataaaacagcttgaccatcaggttgagctgagtaaacccttgagtcagattctctttgttggtcttgttctgctcaagatagttatccagtgcctgaggtgtgttagcattcggcccaccgaagcaaaactgggtagagatccgaagatacctcgaacagggccaggaacggagtaccgaacttgttaagaacgtggttaatttcagtgtagagcgcatcagactggaacaaaggtctccatctcttgaaaatagagtgtgcgacttgcaacacaccaatgttgacggtggggttgtctggtgacagcttcgagacgaggtcctggagaaaacaaatcgtcagaactaacattacaatgctttgttgaatcgcaaattacatcaaccagagtatcccaccgctcccagaagtcactgtcggcgatcacactaacggcctcacccagctggctctgaattcctggcggaaccgagatcatcaaggagatcagctcacgcttgagagtggtgacttcatcctgctgcagcttgtaatttccatcttcgtccgtccagttgcgcttgataaagttcttgaagcatagagcactagcgagacgtgtgttgtagggtgtggtgtccgatgcggtgatgtgaagaagctgtagcgagaacccgggcttctgttcttcctgacgcaaagtaatctcggctagaagaacaggaatcacatcagtcaatactgcttcaagtaatagaggggtcaaatataactcacctgccttgttttgcctggggtccaagcttgcctctaacagagctccaagaccctccgccatcttgttacgtggggtatcaacacaagtgagggggttagatgaggaaagggaaagaggaaaagatagataggcagaattgaggaataattattcagaagactcaaaggggagcaagagttttgacaaccacggaagggagaagataaaaagatccaaagctcaaagataataatgcgagcgctcagtaaattgtcacagcccacataaacacagggagtacgctaagctcaatcgggttagaatgtcacatgcttgagcctctctctgcctcaggcatcaatattaccctatcggtctttcctgggtatggtcttagaatatagaatgagcgctttgtatgaatgaaaacggaaatacgtagaattgaagggtactgttataacgtaaatatttttattttattctctatattcatatgcttttcgtgacaattacaaactcctacggaaccatcatttgtaaccattaatgcttagacaacaatgttgctgacgccgttagccaaatccatctccttggcttgagacaaagccttgaccttgtcgaaacagccggccgcggcggaaaggaatccaaggaatggcttgctgggtgccagcacacgagaaatgtactcggggtggaactgaacacccacgaaccaggggtggtccttcagctcgacaatttccatgcgctcgcccttgtcatcctttccaatgaagtgaagaccggcagcctggagctgatcgatatactcggggttaacttcatagcggtggcggtggcgctcatcgatagaagtgcggtccaatccgtaaagggaacggagcttagaccattcggaattctcctggaagatggtaggacgggaaccaagacgcatagtaccgccaaggttcacttggtcaatctcaggcatgtacaccacaatcgggtggttggtacgctcgtcaagttcaaccgagttggcaccctccaggccacagacattacgagcgtattcaataacggcaatctgcatacccaggcagataccaaggtaaggcttggacttggtacgggcgtggtgggcagcgcgtatcataccatttgtgcctctggtaccgaagcctcctggaaccaagattccatgggcagtgtggacatcataccaggccttgtgatactccttggagttggtctcctcccactcggtttcgaggtgcgaggcatcaacccaaataatgttgagctttcggcgggaagccatagccgcgtgctccagcgacttgatgacggacaagtaagagtcatggagactgacatacttgccaaccagagcaatgttgacagtttcaaaagtgtgctcttgggcagtcgtaagggtcttccactgtttccaagtggactgacctttgagtaactgatcctgagaaatgttgagcttcttcatgttgagaaggtcacccagaacgccaaggaacccttgttcctcgagaagcagaggcacgtggtaggtagagctgacattgtgcacaccaatcacctgctctggctcaacctgacagaacatagcgatcttatcggtggtggccttgtcaaggggtctttcgcaacggcatgcaataagatctgggcttaaaccagccgagcgagcgtcccggatagcctgctgggtaggcttggtcttcaattcatcgtggatgatgggaaccagggaaacgtgctagaaaaagtcagaattgtctgaaatcgaatggtctgttggacgtacgatctggacgaaattgtcctttccagcccgacggcgcagctgacgcagagcctcaacaaaaggagcactttcaatgtcaccaagtgtgccaccaagctcgataacacaaacatctggctcctcgttgctgtcgtcagcgggggttctagccacacgctcgatccaatcctggatagcgtctgtcaagtgcggcacaatttgcactgtacgtccaaggtaatcaccacggcgctccttctcgatcacatgcttgtagacctttccggttgtgatgttgttatcccttccaagagtaactccaaggtagctagatcgcagaatatcaatcagcctcttgtttggcttcaaaaaaactcatacagaggagaatttaccgctcgtagtttccgaggtcaagatccgcttctccaccgtcgttcaacacgaatacctctccgtgcctaaaaaatcatcatcaggaacagcgttcagaaataaagactgatcaaccacgtactcggtaggggccatagttcccgcatcgacgttcatataagggtcaatcttgatcgaggtgactcgagcaccctgggtcttcagcagcaatccggtactcgaggctggagaaagttagggccgaggggactttttcagttcgatgtatagagaggggtaccaattacgcccttcccgatgccactgatgacacctgttatacatgtgttagttattgctcgttcataagagatcgactcagaataaatacctccagaaaccacaacgtacttcatcctggcgatgatagggatgaaaacccgactgaaaaacgatatgtgagatttgatattgagtttaaaaagaatgaccagtataaccaaagaccctcgaagtagaaaagaaatgtagggtgccgttcctggcttctgccaagggggaagaaagaatcaaataatttttgaagctgtaaaaaaagcgcctttccgtggtcaccgccccccactttgattgacttttctgccgtcccgataactatgagtcatgtgatttgaaagagagtaaagagagggaatatgcttgatggttaaatacgatgagtctgtagaggtaaattgctcgaaaaactacttataacatgtccattacaacctccaggtatgcccttgaccatccctatcaaaatacatttaacaagtatgaacttcgctttgatcctcaccgccccgtctgccacatataatgggcggtgtatgatatcagtactccgtacatcaggtgattgggctggaatatcttcatatccgtgcatgattgattaacccccctcaatccacatcacatcacttgcttgttgtgtcatcgatctggtggggtatactggttttatttatattcatcatctgaccttgttatctcggtccaattcacgatcagctgccaatcagggtcgctttgcgcgcgggatattgatcaccaaataccgactgtttcagcttgctacatatatttgagtccctatatgtgcattttctgatcataggaacatcctatgtagttaatcgctgttgtttgtcaatttccaaagggtaaaaattccctatctgcccttcgactgcctatcatggatgatgcaatacctggactaacttggttgtcaaatagttcacaaaccgcgatctcctgactctactctctttctgccactgggcggatgtcttccgatgatgttccacacttctcccagcacaaaccctcgtcaactagtttcgcagatgtcctcaaaactctagctgtcggtcgatccaaatcgcattccccagtctcattacaggaaagcagcagcgactcactgtcttacactgatacctccggaacaaaccggcgtgcgcacggatccgaatcaatgaatcgtgccagtttcatgtcgagttcctcggacactcccagtggcctggatttcgagacctcactccacaatctatcgcaaaagcaaaacctaacgcaggcgattgaagaagcggagggtttgtcaaaaggtctatcatggttcacctccgagcagtccgtggtgctttgggaggctgccgagtacctattgcgtcatgaaagctcgctggatgctcagcaaagcggtgccagattattagaagcgattgcagcccgtcaagatctgtctccatccgccaggcgcctagttttcgaatcgatcacttctccagccgagccggatgtgattgctgcacgcgtacattcgttgatctccctatcagatcatggcaggaaattggatttcgcaggttcctcaattctccatatcatctcctcgtggattgttccattctatgaaacgattgcatccgcacgatcaaaggcgaaaaaggcaaaatctgtcaaaccacacgggcccaatcacgacgaagcagtctttggagatctcttccaattcgcggtcgacctgatcactttgcaacgaagccagccaacccaggaggaaatcgaaatgcttctcacggaaatctttaccgtttgcaggagaaccagtgtcgcggcggatatcaagaactctttggctgtgttcgacgctgtcattatgtatgccgatgtgcctgacataagcttcccaattctcctggaagtcctttgcagcatccatgcatcagttaaacccctctctgggcccacctcacgagcagtgcgcagtctagcgaaatcacgaagacaggaggagatggtaaacacactccatgaattcctgggagattcgtgcgccgctgaacaaagtcggaacttgaatgttctccgtggtacactttatgtgttctcggattttgttcgtgctcatggccaagatggcatgccccagctttccttcgatcaactcatggaatcattgcaagtcattgctcaaaaagacgatagcagggtggatgccgacctgttagatctttgtctcaacattctggaaggggactatattggagtcgcattagaacaggattggacgggatttgccaatcttctcatactctgttctcgccgactcgtggacgagtcggcgccatccaccacttctgcgactagccctcggctcaaacctacgtacgacgaaaccaaatcctacattctggtaaatctcatccgcattgcttctgtgctcgaatctcagtgggaacaactcaacagagagcaaaagcaacatgcggtccggttcctcatgaagatataccagcacattgagcctccacaggctgaactcatcatccattccatgagagaagacaagctttgccatccttccaccgactcaaattgggctcagcattgtcgtgaactagttgagtgtttcgttcaaccacggaaacaaagctcggacatacgtatcctggctttggacacattgaaagaaggtctttccggccatgaggatttacttttcgtccaggagcacggtctactcgggcttctattgaaggatttttcggcagaacatgatcttctcttcttggagtccctggtgtctttgttgaccggcccggcgacacagtacagtgatgatgacgcgttcaagttgctgataaacaccatcgcagcaccgatgcagacggatctccatcaagaagaaccgcgcgagaatcctctgaacaatggatctcaacgccgtacatccaccacgagtgtcttggagttaagcttgacaaacgtctgtgccgtgggcctcgtgaagatgatgctgcgtgccttgaacctctccccaaccaaagctgttatggttttcgaggcacttctagacattgctcaatctccaagtcgaccaatagactctcgtttgacggtcttgaaactactttttcgattacgatgtgactcagctgggtctgtcacagtcatatcaacctccgagagtgactttttgatgaatgtgctgggtcgcaatcttgatggtggctctaagctacaggtccccggcgacagccccacctgcgagattcctcagaatgataactcaccaatctcgccagtcggaaagcttccaatgagagagtctgtgtcaaccgccatgtcgaagtcggccccggggcgtggctctagctctgcccgtggctcaaagttgacggcgccagtgtggacatatgctttgccacaagtgcttccggagcaaccacctggggagtctagtcctgtcgtatttgcttacgctcacccggaggactctacccccgaatcagaaacaatagaaacaaaaaccaagggggtgttgaaggtcaagatgtggctcgaagttgtgatcaccttgttgcagcgagaaaccgactgggatgtttacagctacattcttactcatatcggtccccagcttggtaacaaagactttttcagagatgctatccctcagatcacgctccttcgcagcattctgtgtgatcaggtcaagaatgaaaccttccacgagcctcccgagactaccggattgaaaaagagcgatgtggctgcctgcatcttcgatgcgctttgcatgcttgtcagctatcacgaacactttgccaagagtgaagaggatgatctcgtccgagctttcatgcaaggtatcatcgggtcatggggcggcacatcccgtgggtgtattcaagcactgtcactctgttgttatgaaatcccaatgtcggtgacgaaatcattgaacagcatccttgataggatgtcaaaggtgatcaccatgtcaaacattgccgtccatattttggagttcctggctctgcttgcacgattgcccgatgtttacgtcaacctgcgtgaggaagagatccgcactgtgttcggtatctgcattcgattcttacagacctctcgagagcatcggtacaaagcctctgaattggccgcaagggccgctctgtcaaaccaatcttcccagactaagccaaaggaaactgccgcccatgcaaatgaagctgtcgagacctcccaagacggaatgtcgaaatatatctcgaatctgacctaccatgtcatggtcttctggttcttgtctctgaagctccaggatcgacccaaacatgtgaattggatcaccagcagactcatatatcacgacgaacatggaaaagaggtagtagaagaacaaagccaagttttcattgatttgatgcagcgagttgcttattcggatctcggagagactatccccttcgaaaccttccctccttcccctgaggatggcccggttgcaaagaagtcctgggttgtcggcatgagtatcgtcactgtcgagagcgccggattgtctggattgtctcaggtaaccaagcgccaggcatctggtaccacatattctgtctatcaacaacggacggccccagttctgccgcatcaagttcctgcgactccagatgcccatttacattccgactccatgcggacagcagtccttccgagtcatatcatgcttcagttgactgctactgccttccctacacctacagtcatgcagcctatcccggttccggaagacgatatcactcgacgtgcgattagttactttgatcgcaccgacattgtggacggacatcgtatcggtattctttacattgacaatggccagacaaaggaggcggatattttagccaacactggtggttctgcggattatgaaaatctgctgtcaggattgggaaccaaagtgtcgctccggaacccccaattcaatccgcaaggattgtatgccgataccgatggtgaatacacctacgcttggcgggatcgtgtgactgaaattgtgtatcatgttgcaactatgatgcctacggactttgaccgtgacccggcctgcgtcaacaagaaacgtaatcttggcaataatcatgtcaccatcgtgttcaaccgatccaacttgcccttcaactttgacacaatcccatccgagttcaactctatcaacattgtcataaccccgtcatctcgaattgcctacgacgaaaatggcaatgccaattgtgagacagacccgcagaagctctactacaacgtgcaggtcttgagcaagcccggattcccagacgtctcacctgctgcggcaccaaaggtcatctccggcaagaacttggcggcctttgttcggattcttgccctcaatgcgtccgtcttctcacttgtctggaacaataaaggtggcgagcatacctcgtcctggaccacccgtctacgcgaaataaagaaagtccgtgagcgggctctcgcagcccaaagccaaggctctgaggccgccgaagtgacttatcccggtctgcggcgaaataccaaagccaacatcttctcggaggaattaccctctcgtgcaccgcaagtacagacggatttcgctgcggaatggaacgcagcggcagacacgaacattgtccagaatttggatttctcccgctgggcccgctagttcgtctttcttttcgagcgtcttgacgatgacaaccttaggcgagatatcctctccttttactgtctggatctacaagacaccctctcccctccctgatattcattcactccttatcttacaccacctctccctccacctttcctttcccctctcgatgaccaatgacccctagacgacttcatgtacaccacttgtgtttttttttcgtgatgcaagacaattgtcgcatttgtaaatacccccttcccgccccaaaagttttttctttccagtgtcgtcttgcctgtcagcgactgtcgcgattaggattagggttttattagtgacatgaatcagtgttcttttactgaactcagcagccttctttaatgatcatcttaaccattcaactctatttgtgtaaaaaaagagaatcccccacgtcatgtaactttatgtgcttccctcgctcctttttcctctccttctcattcaccctctattccttcttcttcttcttcttcttcttcttcttcttcttcatggctcctagtctaaagtgaactatactcgtggactatagtgcagatatatatagtgagaatctgataaatgtatagcttgtttattgcatagaccgtagtcatgattataatgaaggatctaactactgacacatatagttgaaccaaaaggagatagaaaatagaaaggagggaaatgcgatacagagcatgtacaagtgtgagggctaggcgatgcagagaaagggaaagatgggtaggttttgttgtgtacaagtagaaaaagaaggttggacaatggaaaggtcgatccggggacagaaattcacatcccaagtatgcaagttctgtgtctctgggattggaacttctattcccagaccgtaattccttctcaaaaggctactatcaccaaccaaagatctcaccaacactgagagtattccagcgcacaccgccgacggaaacgaccatcaagacaacttcgacaacaaccagtaccaccgagcccatcatgaagcgagggctgaagatgcggtagagcatgagatggcggcggagatggccggcccacatagtagtggcgagattgatagtcgccaggtagaggatatgggttccggcagcctgtacgacatcagagaggatgcgtgtagcggggttcttgttcgggtttgaagcggggacacggtcgtgggtctggaggggacgtttccaaaggacggttaaggggacggcgatggcagctaggatctgtgcgccgaaggtattgaggatgacgagtagtggggaccaggggtattggattgttgtgagggggatgaaggctgtttcccactggatgctggagagcgtagcctggtggcctgttttgaagtaatagaaagagccaaggacgccgaggatgacggggccgatggaggagttcgacatggttaggccgtttgtgtcgaggatctcgaggagagagaggatttgccagaggaggagcgcgatggcgccttggcccattggcttttgcatgaggatgacggcgagggcgaagttgattagtaggaagcagaagtgggttccgtagacattgccaaagccgaggattgtgactgttgttcgtgggccttgttgctggccggcgactataggggccggtgggctgttaggatcttccgtgggtttgctcacgttgatgctgacgcaaggcttggagtaaaggtatgctgcagtgcctgctgcgaacgcgagggcgaggacgaactgggctaggaagacgcgggcgaacttgagtgtttccttgctgacgggtagccactcgccgtcgtcggcgccttcgagaatccagaatatggaggcgacgaaaagaccgaagcggaaggcaaagccgatccatagagatgcgacgccttgataggacttggagccggcgtagtaggaccgcacgacgctgggcaggaaaagagtgaccaggaaaggaatggcaagctgccagggggcagaagtggaagaagtcgacgaagcgtagtacgtggagcggcagaagggcatttgttcttcacgacagaggcgggagaaagatgcgattcggcctaggatcacaaagagaatggagtgatatacccccaagatacggtctgtagtttgcttttgtcgcatggacgatataccggcgcacacagcgaatgtagtgaggaagaatagaagaatttcgtcttcccagatagtgtacgagttggaggcaaatccaatagactgagaaacggtgaagaaaagcgcgagccatccccacatgccattcggaagaggcagagtcatgttcgcaggcttcttgacgagagcgggcgtggctccaatgatgcttccagcggcggccagtagtacggccccatcgaccgtagatatctcggtcaggccagtcaaacccaatgcagaaccggccacggcaccgacgccagcgccgacgcttgcgaattgaagcagacgagacgtggcttgggttcgatctgtcttcaagcctcgggcatagatgatcaacaagataataccagcaaagagaatcacaacaccttggatcatgcttggcacatcgaatcgagcccacaatccacggcagatatcaagagtgtgacgctggtacttgcggtagagttcattgctagcctgagcagcggtcgacttggacgagaagcccttttgagcggacctccactcctcttctgcagcagtccaaagtaaagccgcctcttcatcatcaccagcacctctagcaatcgcatattggtgctgatatctcttgacttgtgctgcagtcaaccggttgacagtcgctagatttgcccagttgttcccacgtgcgccacagaaagcctcttcaataggcgatcctaggttattgaatgggatgggcattccaaggagtaaagacaacgtcggaacgaggtcgatctgaggcacgaatctgtcgcgcgcgaattgaggcgggagaagcgtatccttccttgtgcgtccgaagatgccgcgcttggagtacatccacaacgcggcctcaacctcgtcatcagactcaccgccgtggtcgcctttgatgtccatcccatgatctcccatgatgaccagaagagtgttatcatcaagcgcagcaatgatatcgcgaatgacacggtccatttcctgaagcttggatgccatggcagcatgattaggaccatatcgatgacctgcatgatctacgccgagataatggccaaagataacatcccatttattcctgttctcgggctggagaagcgggaagagatgctccgtgacgccattgtcgacggtatgcaagtcccagacgttgaatgagtcatacgcatgcgtgagattggtatcaaagtagcccgggaagagcgcctgccaggtatcgtcgccgaggtgaaccaggttcttcccggcgctatgcaactgtgcgacaagattgtcctcgtcgatggcggttccggcgaagttggagcctgcgtcgaggaaggtgggcagggttccggtggtcaagcctttcagacggttcagggttgttgtcggaggatcggcaatgaatggcaggaggaaggcgttggcggggttttgcactgcggtctcgtagaggacagggatgttattgtggaagaggtgggctgtatcactctctcccttcggggcgaatggcacagtgaaatcataacgaagagcgtcgattatgatgacaacggccttgtcaaatgtcttctcgtgccagcagcctttctgctgtttactccctagggctgtagtatgttgggctaaagtgtcctcgaaaggcagtatgtcgcatgatgatttgttctcaaggaccatgcgcgtgaggagaaacccttttgtgaagagataaataccggcgacatgcaaaagtctgtcattaaccagcgtcagttcacatttattttttaacacttcaacccggcagcgggccttaaacctcgagctctgctaggcctaggcggaaccactcacaatatccacgccagaacacccatcacaccaaaatgcttaaccttaaactcatcttcaagctccagcgccttctgatccaacaggccagcttgcttcagcttggactgcccgccagacgatttctcggagctgcgaggggaggcagctggaagaccgcttttaggactgctgggatttggagtccccatagtccctgcgggtcgcgtgaccatttctaaggtctattgtattgtcgcgggtcgaagtcggggccagctggcgcaccaggtcgcagatctggcttttggaggccgaaagggcaccgaaggaaccgtgaatgatgagccacggtgtgttttaggcgacagggaagccgggagcaagcacaaatgatccggttgaatcggttcaagcgagaaccctcgaagtagggtaaaaagtataggcgggggggcggaggagatggcggattctgtgctctgtcgaacggcttccctctgtatcaagaaactatatcatgcacattgtttggaggagcaatgtataccaagcgcaaataatagggggaaagctgtgtaagtaaagagaataattctaatttccctgacagtcgcggaacccacgggttggggaactcggcctcggcgtttctcattggccggctggcagcggatacaactacatagtacaccacactatactgtatacaggagaagagagagatatctggggaaaggatagattccagatttgcctaaatgtcacgaaacataggagggctaagtacatacattatccagctgccgggtaccgaaaaaaggcacatgagaaggaaagtaaaatagagggtccctcaaacgtaaaaataggagcctcataaaggggggtgaagaagagaaagtcaaaagcatgaatagtcacaaatatatcgggccctaggaacatagcagggacgaaaggtacatgaggagccaggcttaagaagtcaaacgccagaagagaaaaaatcggcaggccctcgctacgaacgatccagtttcaatgaatattggaatccaagcagtgtgagctacccatgagtctgtccagaaaccgggtattccgacggtgtgcttttgagaccaaaatagaaactgaagggcatatgtgcaagccatataggccaaatcggaaaggagagatatgtaaaaggtgaaatcgcaaaaaatatttgccagggtactcgtcatgctttgagaggtcgttgaaggtttgagagagattgagcgctatgcgggtgggatacgcagtcggtcaattgggccagtcggtttgacacgcctttaatggtatgtcttcgtctcctctttctccctcagtccacccatccgctcgatgtccagggactggaagcgaccggtgtctgtgctttggtagggcggaagatcctcatggcacggttccaagccgatgctgcccgcgtcactgatgcggaccacgaccacgcggccagaggtgcgtttgccgcttgcatcctcttcttctgggaaggtaatgcggatctcaggcacagggctcggtggggggctgtcggagttgtccatgaggctgcgtttctcatcatagacaagaatggagtcggttttattcgtcgaaatggttaggcggcgcctgttgggtgactctccattgtagactgggagcaagtttttgttccgagactggcgcttgcggcggaggatgagcaggccaccgaccagggcgagggagagcagaacgagaaccaggagagcaatgagtaggtctaccatggcgtttgagagtccgccattgctatcatcgcgagcaacaatgcgggggaatagattgttcatcttgttgattgtcgattgtggattgtcggttgtggggtgtcggttgtcgatggttggattttcgatgccgagtttgagaattgtatgattggaagtcgacagctatgtatcgtgatcgtcgatttcaaattccaaggaaggtctcggaattaatccggggaagtaaatactgatggaatgtgcgtgcaaatatcggtcacgggatcgtgtcgaaaaaaagggcgaagggtcgaaacgagagtgagtaggttaacgaaagaatggactgcaaggtgagccgctgaaagagtgaagctggcacctgcgaaggaaaagaatggaggggatgagatgagaatgaagggaaaacagaaaagggaggaaggggagaagaggagaaggttgcaagcctagaacggcttgctattgttagtgtcgagctaagctcttcgtggtttagcctggttccttgggcgttgctcggggcctcttggccgacaggggttagccaatcacaggcccccagtgcctggagaacgggccctccggggtcgatttgcgccctctcattcggtggctccactgaactatgccgattgtattttgattcccctgagatcctcatggacggcataaatctagggctatacgctgtgtatagattggatagatttagatcgcaaacacaaacatcagtaaatgtttcgagacaaaaaagatagtcacgggtagtgcttattctggttgcacaagcgtgaatcactcggatttaggcgtacggtgcaatgtcacgagccctaattgtctaggtacatactacatagtgacatgatctgttctctggggggatcctcgtgcgaaaataacaggaaatgagtgtttcaaaaatatgtggagagatcatgatctcatgcacctgatcttcgagacataaacaaagcccttgtttgcgtcaaccaaccacaacaagtaaagaagtaaatcgcagctattgtttgttggaaataaacaaaagaagtaaggaacaaattgttcattttgaaaaagtggacttattatatcatatagacaaagttgacttagtcgaactatgcaaagatgccagagatatatttctctttcgctactcgacatactcggtacgctcgccttagatcacatgaaatcaagcaaccgagacagaactggacgcgtgattttaaatatatctaggtaactcatgaacaaacctttctgagtactcgaaggtttcattgaagtccaaacatttacatccatactcgaatcgaggtaggagatgagatcgttgatctctgtttcatagattggtgtttgcactgtttgcagaagtggataactacaactaggtatcccacttcttacttcctgcttccccatctgttattttttaattaaagacctggcttgtcacaatgagctgtttccaagttaaattgagcaagctcgtgtgaagatattctcgatgccgacccaacgcttagcccaaaccacaaagtggggttcggaggctcgtctcacctcacgtgcccaagctgaggatagtttgacagactacaacggagagacacactgatcgatataccgaaaagcaaattcacacggtcggccgcgctatgtcgtgcaattttgactgctcggctcccacccccttatccccaaacagcgatatcactgggattggggtatgagtttccctttctctcggccgcggacgcatctcacactcttagatcattatcaacaatatcgtgactaccggcatcgctgtagtgatcatttcaatttactacttcactgcctacgatcccatccgcgacctgcctcatgatggtcaaactccgtttcgacccaacccagtggacgtatcctctttagcattgttcaaatcatacctaagccctttcgtcaaaattgctaggagcaaaagatttgcgaatgtcctaatcaaggtgggtggattcttatgagatcggatcggtgaatcatcaaagtaacttcgaaaaacagtgcatccgagcaatgagcgatatgcaaatcatgacaggctttttcctcctgatcagcgggtattcccagctcaaatgcggcctggcaacctatcattggctagtcgttgttgaccaggcctggctttcctgcctagtccagttatcctgcttaacgcacctacgcagttatttccacaaccgccctatcgagcggacattacggttactagcagccggtgtatctacgataatgttgatcgtggggcttagtttcacgggaaactacgattgggcctttaacgcagatagtagcgatcctgatcacccgacgattagtgaccctgcaatctgttatatgcgcgctcgtccggcgatgaattcggcctttttttcgatgcctttctcgataattttgattatctttggatttgcttcgagggtgattaacctctacgatacgctttcagttagcgttgttagagctagaacttcccttgcaggacatatacgagggttattacgcattgtgtataactggagccgggcgtctcgctcgccacgaagtctgaaattgacacttggatatctccccctcttagctctatacctcacggggtctgtgtttgtggatgtgtgggattccgctgctatagaggtcagatattatctatgggacgtgtgttgattgtattctatgttctctaactcgatactaggtcgtctggttaatcatcgcctttgcattcggtatcacccgagtgataggaataatacatcgaccggaaaagatgggcctcgacgcttcgttgactagtttcaatgattggtcgtttggccaagttggtgctatggtggtactagccgcaccgcttatcacactcatcgggttgttctacgagggtgagtcaaaccatgattatcgtctagaatcaactgagatctaacactcgtgtagaagacgagactcgtgtacaggatgaggaacctctctccgacagccaaaccgcaccaccgccggaactcccggccccttctatatcaaacgtaatcacggacctcaatgatcccttcaaggattggatctcgcactctcaaatattctatctggtcgacggacatatattcacaatgctcataagtgttttcttctggatggcagagcgtgatcctttcggcaagataaagaagacattattagaggatattctcgtctcctcgggtatcaagatggttgtacccattcttttctctttgatggtggagactatctttgcggaagctggccctactagtatttcttacaaccttgcgcaagttgtggtaaagctgcacagcctgagctgcctgacgtttttcagtgtctccagttctacgaagattacttattgtctcctgcctatccttgttatctgggctttggcgcatcgcttctatcccttttttcaagctttattctcgtcgaagttgctggcctttctgcggttgtcatgacattaattacactatgatctttccaaatgttgtttccccatgctctggtcctccctcggttttatttgatccatccacattccatgcctcttcgcactacaaacgagagaattagagtgattccccgtttttgagagcggagcgacatcattcacagctgcatagctcacctaccccgtccgatccctctatcgccatgaacggatcgcgactcacgatatctctcgggagagttcacgaacaacatagaagctattgaagccaagaatttacttcaattcttaacttatgtacagaattggtgtgccactggtgtgcggttggtgtatgcaattgaatcaaataacatattccaaaatagtacacgcagtccgggtaccacaaataaagtacctagttccagtgtgagtacttggtgcatggtctaattactggttaaatggtgttagaagagctatttcttcatcatacatagagtgcatctggacatggtcttggagcgacaggtgtttagtgtacctttgaacccttcttcagctaacactaatattatatgttgatttccaaaatatgatctgatcaatagtatgtattttaaatgcatgaatggagatcagcatgtatatatctggcttaggcgatgtcagtcaaagctaaccttcgaagtcttaccctgccagaaatcccccacagtcggcgaccaccaaactccccggccttttgtcgacactgccaagaccgacactcgagatcaagaacacaaccaacaccacgtcgctactaaaagttgtcaactgcaccgactgacatctcctacgttatccttggcatacagtgtaggcagactccgcacgtttgctatgcggtcaggggtcgccaacacacaattcgacacctcacaaacccggagaaaggacgatcacgatcatcacaaatggtaacacggccaacgctcatgaacgctgcatattctatgcaagccagcggtcatcgcgctcgggaccaccgagtatgcctaagcctacaggcgaaggacgcaaggcaggcaatgcccctcagaaatcaatccggggaaggtttctgcgagtgatggtctgacacttgacctgtgcgacccctgtgcaaggatccaaaggcgagtatccttgtcagtctctctctgccagtctatgtctcggcctttttccaatctcgccggggaaattacaccgcgatgactggataccgtacgtcggcaaatgtccaacacatgtttgatgacgaccgttcttctttctcatttctctgctgggtattctatgggcttctgaaccggacagtaagcatttagttctcgtcattcaacaggctgcattgccaaattcgcccacagattgatctaagggtcagtgtgacgatgcgccgaagcaaggggctggccgagtctacggaagtctacccagttgagaccctatttccgcggataatatttatggatctgacacttttcatagcgtgaagcatacttctatggtcgcgcgcgagactattgcaccactcgcagttggggtttggctcattgatctattgagagtcagaatcaagggatcgaagggcaatcccaataccagcgcacggccgaaaaacagatggaacataaacacgaaaaaaagaaaggaaaaaaaggcaagacgaaacaaaacccccctccctccattgggttcctgaccaggcggagaaagtaagccaacgagagagacgccttgccaatcctggaatggtaggtaatccgcaggtaatccacagttagaaaggtggcggcccttggctctttttggtcaagaatgtttccggatccaaccggacgttatacgagatgtttaaagcaagagtactgaatatgtagggcataggcatatatggggtgtaccttacttgcggttaagactaaggtgggaggggcttagtgggcccgatcctccagaaaccttcaatcttttaagataagccgagaattatattaagccttagcttcatttcgggacgaataaggtagaatcccggccgtgaagctggattccttcctgattctttctagcgaaaagtttcttgtctatattagacgttaccggctccattcgggagtatgatctgtcttttataggggttccatggtccatggtcaacacatataggtgttctctagtggagtggtgaggaacttttagccgaagtgtttaatttcccccatggtgacttcagagttgctcgttcacgtctattacatgtcctatttggtagtattccagggactgtttgttgatgtactgacttggaccatgggagatgatgtgagtagttacctaatagggcagtataggaaaggttgagtgtagagtgtatagagagatagaattgcaatagaatatgcaatgcaatgtgttccaatagcagtgtgtatgtatacaatccctatatacatcctctcatgcacatccagatatcacgatgtagaaacaagacaaagagatggggccgggctaaaaagaagcgccgggaggtagatcgcggtgacggtcagatacatgcgccataaacccaaatggctgcaaagatacctgggtgcacagccaaactctaacctaaacgcaagtaccaccatatcgcatgccggatcgccttcttcatatggtcatggtattacgcggcaatacagcggctgatcggcctgagcagtcatccagcttcttgttatctatccaattgactcttgtcctgtcactttttcttcctttcttttcttttccttcgtgtgactcttgcttgaattcgtccttttattccatctgtctgctccctttttttctgatcttttcttttttttccatccatcaccgcctcaccgtcatccactcccccaggacagccacacacaaaaaaaacccttgggctgtcatgctggcgcctgtgtgacagctggactacattaatgccgtgccttgtctctcgtccacattcccttccatcgatccactgaagcccggattctcatccttcttgcgcgagcgcattccattatcctctcttagttccgcctactcgaaaatcttcccccctcagacatccaaccaccccttgcctacgccaatcaatctagggtcccccaacgttctgattgccattctcggggatcgcctctccataaggcacatgaggacgatctgcacactgggagattcctggagcatgcacggagcagagtaacgtcgcggcgcctcctcaattctgaactttccggctaccaacttgcgaccccacagctgcagcaaacgaaagggtgataataatcgttccaattctttgtcaccttgcatcttctatcgctgtcaggctcgatcgaccttcctgccaccttcaacatttctcgcctcatccagagctcgttgctcttcctcccttccgtctcccttctcttgctcctgtataatctgtacatgtcctgggttcgccgttgaacaatacagaggacaacgttcgttttctcccatttcgctctttcttgtgatcccttctatcccctcttttggtgagctttcccttccagacacctgggcaccctagctgcctggatgcccttggacctttctccacaccttgcaacgtttccccagatggcccagaccctgctaacacgggcctcttctcatcgcagtcttatattccttcgtgtacgccgtctctggtgcctggtgcccgtttgcaaatactagtcgacacagcatcggccgatcgtctcagctctgtgatttattactacgagacaacactccgaaaaaaataatcgtttgccgttcgggtacatatcgaattactcttctgccgatcggagatttcctgggatggcttctaccatggccgcgaatgcaaccagcgtacacaacgtgagtgaaacacatgggtgtggatcaatggaatgtcgataataacatcgagtctaggcacgatcgaacagagcgtccaacatgggttcatccgggatgaacgaccgcaaccgcagctcacaaagcaacagtgtcggtaaaggtttcggtgctagtaagactagctggaagaacaacatctggggtgactccaacctaggaggattcggagatggtgagtaattcgtacaccaattgcgacttgggctgtgctgacaaattttgcagaacaacacctcggcgagactgcattcgaaggaaaatctggatctggttcccttctctctacatcagagtcagacggctggtcgggacgtgccaacctgccttggagcactgtcaacaccaacccctccttccagaatagaggcctcgccacatcccccacccagattcgtgcaaatgaccgcagtgctcctgctctcaacgaagctagtgatggctcttacttcgctctacctcgcaccactgggaccgcgagccagcgcccctacctcaacactagttcggagggtgtatctccatccggagaaggcctcaccttcggaggatttactggtcgacgacagatgaactcaaccggtctcggtggtagccctgtgggagcgactttccctgtgaagcctggattctcgaaccctctcgatgctggaagcggagatggaatgggtacttcaatgggcatgccatcgttgggatctggaattgccgagcacatctctccaacacagggccgcagcggcctatcacacgcgtctcacaactccgcctcttacactactcaacgacccactcactcagctcatccttccttctactccgacaatcacagcatcgatggccgctacagcggtggctccatggacctcaacgccagctttaacaagctacagctcaacgaagctaactatgcctcccaagcggcccagcgaccctcgtttattccccatgcttcctttgatggctccttcccgcgcggaaagtatcagaacaacgaagacacttaccaggcactgggatacaccgcagaggctgcgcaggagatgcaccttgcttaccaggcacgaaccagagctgcgaacaccggctccatctcaccctccgactatgcccgcatggatagccccatctatcccggcgtggacgggggtgctcagtatcgcaatgcagctccgagtgaaagccaagtggcagcctttgagcgcagactccgaaacttccaggagcaggagcttgcccaaggttcctcgcgattgcagtaccctccttcttttgacttccaagcataccaggcttctcgcatgaatgcaatctctggattctacccagtaggtcatcttagtggcctcggtgccgctgctctggtctcacgcactcaacgcgagcatgatcctacccaggttgtgcgcagccctctcctagaagagttcagggccaatagcaagggcaacaagcgctacgagttgaaggacatctacaaccatgtggtcgagtttagtggtgaccagcacggctctcgcttcattcaacagaagcttgagaccgcgaacagtgacgagaaggagcaggtgttccgggagatccagcccaactgccttcagttgatgaccgatgtcttcggcaactacgtcgtgcagaaattgttcgagcatggaaaccagactcagaagaagattttggccaaccagatgcgcggccatgttctggccctgtcgacccagatgtatggatgccgagtggtccagaaggccctggaacacatcctcactgaccagcaagctgtgatggtcaaggaactggagaaccatgtcctcaagtgtgttcgtgatcagaacggcaaccatgtcatccagaaggccattgagcgtgtcccctcggagcatgtccagttcatcatcaatgcgttccgcggtcaggtcaacagactggctgcccatccttatggctgccgtgtcattcagagaatgcttgagcactgccaggaggtcgaccgccagtccattctggccgagcttcatgcctgcacttccaatctgatccctgatcagttcggcaactatgtcatccagcatgttatcgagaacggcgacgagaaggaccgtactcgcatgattgacatcgttatgggacagctcctggcctactccaagcataagtttgctagcaacgtggttgagaagagcattgagttcggtgcagaacatgagcgtatccacatcatcagtactctaacctcttcgaacgaccgcggcgagagccctctccttggtctcatgcgtgaccagtatggcaattatgtcatccgtaagttcaataccatcattttttgcgtgctatgctaacccccaacagaaaaagtcttgggccaattgaaggatgccgaacgtgaagctctcatcgaccagatcaagccccttctcagccagctcaagaagttcagctatggaaagcagattgtcgcgatcgagaagctcatttttgaccccaactctcctgcgaccgtccctctgtctcaccccacctctaccactcctccccactcccacaaatcctccccgcaacccgccaagcgctcaatcccgactactgagcagccccgggcgcctttcatgggcaacgctccacctactcctcccccgacggatgctcagaccaccgtcgatactaccctcgagtcgaagggcctcgccaagagcacggtgacctcggtttcgagtcccgagacaggcaacaccggtgttaccgtcccggtcgatgtcaccagtgctcattaattcgctgcacactttatcttgctcgcccaacataatctttctaatgctgatttgatctgagccgagtgacttcttgttctatctaatacggggcgtatacatacaggggaatcaggcgggatatatgttaccaacgtctatgtgattctcccctttgaccatgctttgacggcgcaacaatgagggcctggaatgtctttatttctttctttttctttcttgtgttgatctcgacctcgatctcggaccgccgacttatttcttatcttactttatttgttcttgtttctttcttgacatgttcatttattcttatgattgtctttgtgaatcattgtcaattcttcttgctacgaaatccaggtccggcaatcgatatggctccggcgtctatgttctttccacttcttccatttttatcttgttacggggttaaggcggctgtgatgggggaaaaccggcaacggaaatgggaacgatctttcgctcttcatgtcttccgaccgcatatgccatagcatggagtctggaccatccatattcacattcgggtccagcagaaaataccacgaaaagaatcaaatcaaccactttgcacatcagctaccttgtccatggcatctgcatgatctactcagagccacttgttactatttcttcactggccgagcaacatatttagtcatggccatgattctcaattacgagatccgcgactttcctttccgtatcaaggtgttcttatcaaaggcgtttctacgcttctcggtcagcatggaccattctgcttggctttgggggcttgtcataactcccagctcttgtggatttcatgcttgttttcgggttgccctgttgagaatttctctcgtggttttcttttcttcctcttgctagtggctgtgtatcatcaatgcattatgacttgacttttaaattgcttcagtatcattgagaatgattcgtaccaattcgctcatgcatcgtagcatcctagcatttagtacaagcccgaatgtgaagtattgtggtacgtagtggccactcggaactcgatcgttctaaaaggtattctaaagtgtattctagtacatttaaacagaacctaaaaccgagtcactgtgcactgcgatagttgacctatacagaaccatatcacacgtgactcccgtcccgtgatgcccgataagacgatgcattttgatagagttggagcaaaccctcaacatttccagtgaccagcattgtttttctgcgcgtcatcggatgaaaccttcagcaccaaccaatccacccatcattgctgaaatccgaatccgagctcgaaagaacctccatccagagtcggcatctagaccagctccaagctctcatccattccgcaaaaccataactacaaacctccaacaataatcaccaccacaaaagccacacacaatcacctaccgaagaatccaaatctcctacttaaactccactacttattctcccaacccaccaatcaccaccacaaaatgtcctccaacgtcggcctcacaaccccgcgcggcagcggcacatcaggctacgtgcagcgcaacacagccctcctcaaaccccgcaacaacggctacggcgccccatacccgcccatcagcggcgcaaacggcagcgggcccatggaccgaccgttcaagcagcgcgtaccggacaagcagatcctggagcacgaccgcaagcgcgcgatcgaggtgaaggtgatggaagagcgggagcgactggaagaggagaacgagcggattgaagaggaggcgggggataagaagaagaaggggaagggtgggcatgatggcgagggggagaaggagaaggagaaggttcttactgaagaggagattgatgagcgatgtgatacgcttcggcagcggttgctgaaggagcttgaggaggacttgaagcgtgcggagtcgggcttcaagaagcctttctctggctctggggctggggctggtagggacaggcgcaattttaagtcttatcaggttcatgagcttgctgaggcgaagattgaggagacggagaggttgcgcaaggcttttgggttgagggaggatcgggagactggggagatttcgagttctcgtgattatcgggagaagaggagggattagatttgttcttttctctgcttggttctgcggtttgcgtttttttcttctcaagtaatggttggtgttgatcggtgttagggttatgggattatcatggaaatagggttgcatgaacaagtttctttctttttattgttgtccatgttatgctgtacaatcttcgaatgcaaagaattgaacaattggatatcataacctcatatataatacaccaaaccagtacctatgccacaaacttttcaataacccaaccctccttcgggtccttcttctgcacaaccttcttagcaggcatcggccaccccacactccccgaatcacccaccaaagcaggaataacccagcaagatctgcgcggcggcacaccgtcaatagcatcagccttaccaatcggctttccatactcaataagcggcgtaccatgcgcaatcgccgagagctgcaagccactgggcgcaacaagcgggaacattctaatcttaggaacctggtcagagaccagtgaagcagaagactgctgcagatgcgagtaagtgatatactgtggcatttccttcggcgagagcttagctagcagcgaagacggatgcacatagacagcgcgttcctccaggtcctggcccttaccgtcgcgggagcggaagagcgtcaggtaagggacgtctatggcgcgacggggcgcacgcgggttctccggcgggacgggggcgagatcagcgcggatagcgacatggtcgatgaagcctgctgtgacgatctgcttgagggccttgatttgctttggtgagggctctggcagacgggcttcgtaggcggggacgacgcctgggttgtttgagcgcacgatgtcggttagctggcggcggagctgggttgcttctttgaaggcctttgagcggaggaacattttttcgcagaaggcgtcgccgtcggaggcgtagccgtaggcgcagattgctgagagggattttagcgcgtctgaggtgtcgtcgtgtttgctgaagaggcgttgggcgcgggcgtatgctttggtgcgctgttcgcgctcgtcgtcttcgagacgatctgcgtttgtgtagaccttgcgtctgtcgctgtcgctgtcactgtcgtcgttgactggcttcttggctgtggtgggaagggggttgttggggtcgagctgattctcttggacgaagaggtcgccgactgctagggctgcgactagggcgatcacgtagggcatgcagccgtgttggtggccgatgtggagcattttgctgaatcggggagagagggggtatgtcgagagacgacggccgatgggcgttacctggccgtcggctgtgagggccccgaggttcttcagcagtttctctgcctttgcgagaccttggcggctcggtggtgtggggaatgggaaattgatcacgttgtgaagacccatgcttttcatctggaggacaacgccttcgatgggcgtgcggagaatctctggctcggtgtattcagcgaactcgctttcatagaccgcagatgagtacattcggtaacagtggccaggccctgttcgaccggctcgaccggctcgctggcttgcgcttgccttgctgatccagccgacctggaaactttgcactccagtgaagagatcgaactgcttctccttggcgcgaccgcagtcaaagacatacttgataccggggatggtaagagatgtctcggcgacgttggttgcgaggatgatcagccgggagttctctgggggcggctcgaataccttcatctgctccttcgtgggaagttgggagtatagaggcaaaacgtgaacgcgagttgacgagtccatggcctcttcgccttcggcaagttcgaagccttcgtcttcctctgcgtcatccagtccggtgatctccatgtcactgtcgtaatcgtcatgtccaggattatccatctcggtgccgcccagctcaaggtcctctgcttccagaggtgcttcagtagctgagagttgcacctttgcctgtgtcgtgtcttcccgctgagtaggtttgaacgcctgcttcagccgcttagaaagctgccggatttcgttctgaccagtcagaaagacaagcattccaccggcaggtagtttgcggtgtccacgcgagaccttgcggaacgcatcctcaacataatcacgctgggtgcggcgggagaaatgaaccgcaacagggtattggcgaccctcggcttgaaccaaggggggtgcaccattgcggaaaagacttgggttttcagtgaaatccgaaatacggagagtggctgacatgatgacgaccttcaaaggcttgacagacgggtcctcctcgctcaaagacttgcgcaggcccacaatacggctgaccattccaatcaggatatcagtgttgacgctgcgctcgtgagcctcatcaataagaatgatagagtatttgcgaagggcaaagtcatctgcaatctcccgtagaagaataccatcagtcatgaacttgatggctgtcttcttcgatgccgtagactcgaatcggatttgataagacactttctcgccatgttgacccaattcctgggcaacgcggttcgccatactcacggctgcgactcggcgaggctgggtgacaccaattagacccggattagggctgtctggggagccgaagccagattcgaaaaggaactggggaagctgtgtggtctttccactaccagtagcaccccaaatgacgacaaccgagttgttgtgaattgcctccataatcttttgttcttcgccaacaacggggagtcctagacgggcggtttggatttcctccgtgcggttgaccgcgacactgtatgccttccgattaggatcgccatgagttacctgaagctcccgagggaggggttcttcttgggtagtattgtgggttgctggcaacttagatgggtcaaacacctgcacttcctcggtcacggctccctcgttgggtttgaagcctgcggcttcgttgatttgttgtaccgcccaagatttaaaggctgactggcgagtcttgagcgttggcttatccacctcgtcatcattttctgagtcttctgagtcttctgagtcttctgagtcttcatcctcatcctcatcctcagaaatgccctcggaggacgaagtatcttcctcttcagaaccctcttcaatatcactttcggactcgtccatatcgtcctcatcttcgtcttcatcctcctcacccgaatcaaagccctcccatgcgacctcagcttttaccggtgcaggtgcgggtttcttcttcggtgcgcgcttccgcttctttagaacagggaatccatcagctcctagctctaatggtcgtttaagtccacttccagcagcagcctcttctcgtaatttttgttcattgggatctgttgcgggatcggaaactttcaggtggatgtccgaatcgtcggagtcatatcctgagatatctgcggaagcattgtgtttcggcgcggatacggctcgcgatgtagatacgtcgtcatcctgtctcttgcgcttgtggagatctttggaactctgtaaagccgaagtgtccacagacgattgagcaagtttcttcaacaattcgatattttcttccttcctgagtttgttttcctgcaggtatgttagagccatatctttctattccaggccatccacatacaatatatttgtccaagcgcttctgcttctttgaggacatctgaggatgctgctcttgtagctctcccttcagcttctgtcgccgtgcctctttctcatccttcgaaacgggctggagctgtgcgacattggtatcagccgactcgccgtctgggttttgccggtgcctttgttttctaagacgtggtgtaaatttaggtggcatcttggggtactgcagccactccggctgagaaaaaaaagtaaattgactaagtatgtaagctctgcgatccaactatctcttcatcgaaaaaaaattagggcggtcggatattgctggttcggaccgaggcggtgaaactagccaccgcctacgagatacacctagttaagcccctcattctttagtttctcttcagtatttcgataaagataaataattcaaatcaccatggctggatcttttgatacaagctctctgcaggattccctcaacctgccatttcctgctaccactaagcaggtggcggggttagtcaatggtgtacaaacagatgtgatgataatgagctttagcgataaaatcatggtcacaatttcacaagcaggacgactagcgcactgggtatgtcttgcccttgctttcagaaaacatcgctaattgtatatagttgcatgtaccaatggagaatcagaacccaggcactgagggcatgcacactctcgctgagggcgatgatgctctgttgccccttaaaagtctaaccaccaccactttattaggtggctattctcctggacaagatacgacgggccaactacttgctcgtcagattgctacagctattgcaatgaaaacacctagtgaaaagagactactcctcgttggccttggacttggcaaatcaactgctgatagagattcattcttcgctattgttgacctggttctgcaatgtctatgaactgagcatagatcgatctctgactgagaacaaagcagccctcagaacgaggcatgcgccagacgtcgggcgcgcttcagaaactgttccaggccctcatttgtgatctctccgtgaattcgaatgcgctcaacttcaatgaatgcgccgcacatcaacaagtccgccaggtcgacctcattcatctggcccccagctgtccagttcttcctcaattcgacgatcagcgtgcggacggcgaggaatccatcagttttatgccgggtgatgaacttcagaaattggcgagtgcgcttctcggctttctcggggtcgttgtcaccaagcgcgattttgattgctcgacaccggactgtcgacaggtgtcgcaacactgggcaaggtgggtcaaggtacgcgtatctggcgaaatccatcaacaccagagtccgattgctcagcgcattgatccatgcgaaccacgcctctgacatccagttgtacgatacaaatcgcatgcaagtcggaatctttgggaccatcccatccttcttgagaaagacgggctcctggcagtcgtcgaaagcgtacttccaaatctttgcgcgaatctccagcggcagccaattgaatgggcacgggctccgtctatccacgatcacctccgggggaaatattctcatgtcggcgaggaaccttttctcgaatgattcccactttgcgccaaacagcaaccagacccttcccttgaacttatcatcggcacgacgggtgatgaagaaaagtggtgtatcggaactagtactttgttagatcaaatggacttggtggcatcgtgcccatagaattgtatcgcttactatgcatacggcatcctctttggtctcgggactacctccacttggtcagactgatgcagaaccgccgaagccgctggacgtggggcttttgaaaccggggcctttgaagctcgaacctttgaaactcgaagcattgaaatcgggaccttcgaaatagggaccttcgacagtggggcctcgaaaactggagtctccgaagcggaggcctccgagaccgggacctctgaagcttgaatctctgaagccgggacttgcgaagccggggccttcaaagctggggtctccgaagctggggtctcaggaaccgggtcctctgaagcttgaacctttgaagccgggacctccaaagctggggcctctaaagctagagcccccgaagttggggcatccgaagatatcgctttgtcagaatcgcgcttggccgaaatccttcctcggatacgctcacgcacggccgaaacctttccttggatgcgctcacgggtgcccgaagcacccgcttggatgcgacgaacagttttcttcattctgttcactaagtggtggccatgcgtgatgaaggagtgagatgtgacaaaggagtgagatgggataaagaagcaagatgagataaaggagcgagatgggatgagagtgagatgggatgaaggagcgtgaggggaaggatcctgatgggatggtgtcgccggcgacccaacgaggcacacgctcggcgcttcccccactactatcgtcatgtctgcctgcatcttatgacttgagtgtttatagacgccatgactgctttgatttagagaactcctagtggtcaattacccgtatatacttgttcggagttaggtctatttcggtattattctgtgaatcggaattgtttaaggctatctatcaagagtgatcatcatacaccggtctaaaaacgtagaagatgatggcattttgaatatcaaatcagttttcttcctatgaagtgattgtaggctatgactagcagagatacatttgatattacggtatggccagtcacgtggtagatattgacaaacaggggagacgacatctgtaggtccgacgtgaacagatgagttttggggctggcacaatcataatcccctagtcatctaaaccttcgtctgctggttttgatattccttttagtgtatacattctgcatcctcacatttgaaggtcttcttagatttcatactccacacatcaaacattctatttttatctgccgcccgcatcatttgaatcctttatcttcatctatttcttttcaaaatcctgcgtttcggtgtctgtaaagttctgcataatggagccacaagtggatcctgagttaaccgctgccatcgaggcctctcgccaagatatgtatcgccagcagaacaggcgagcgtcccaggataattttgtggatctcaccaatgactcaggtgatgactcggacattgaggaggtattccccaaatcaaagtctgtcgttagttccgagaccgaagatggcgaagagcacgagcagctgcaacgcgcccttgctatgtcgatggagcaggatgcacaatctcccaaacatgctactgccccgcatgaggtctctgcagcgtcgacgggttcaattttgggcatgaaccgaaagcagatggaggaggagcgtcttgcacgtctggccaagcgcaagaccgacaactctttgtctgagagcaaggttgatgatactacgtctaaacgtaaggccaatgacacttcatctaagcgcaaggccgacgatacttcgtcgactccgccatctccagttagccggaagcttcctaggactgagcctttgccagcccgtcactctgtcgctctagccaacccgtttcaagatgctccccaggcaagcacggctcgagtgagatctcaagtctgtcgccagcttgcaacaaatgccccgaatgttgacatccaaccgacctcctgctcagtggcccaatggcctcttggagctgtcaaaaaaacacatatcgccggcttccctcgcagtggaaatgacattacaattgaagaagttattcagcgaggagacttggagttgggcgtatttagctcatttatgtgggacattccgtggctttgttccaagtttaacaatttaaccacacgaatcatctttgtcatgcaagcaaatgacgaagaaacggttagcaacacactatgatcttgaatgatacgggctaacgtgacttcgcttacagcgagagcaataccgccaggacgttagccacatgcccaattttcgcctgtgtttcccgccaatggagccacaggtaatctgtatgcattctaaactgcttctgatgtttcaccctggatatcttcgcatcgcagtcccctccgccaatctcactcccactgactggggagaggataggctcatggaaaacgtatgtggctacattcgcctgatgttcatggattttctaacagtgtgcagactgttttccttattgatctgcctaagctcgaagttcctggtgctggaaagaccccattctacaaagaactagtctacttcctccaggccgaggaactccaccgcaacatcatcaagaggctagatgagtttgacttcagcgagacgaagcgctatgcctttgttcatgcagtgtatgtattatctccctgggtgattcccctggcaaaaaccagcaaccagctaacaatctaagtggcggaacaagcaccgaagacaactggaaacgtactggagttagcggtttgggtcgtgctgtcaaagctctcggcctggagacaaacgcgcccattaacgtcgactatatcgtaagttttacctgctatgccttcatataatacaatactgggtatactaacaacattcaggcctcatcgctgggaaatatcaacattccattcctgcgctccatctacctcgcttgcaaaggtatgtcaccatttagtaaagcccagacgaactaatccaactaactgcaaactgctaggtgacaacgctctactagagtacgagctccgaaccgcaaacaagaaaaaggaaccccgtacagaagtggaagcgattaaccgagaatgtctcgaccacttccgtatctacttcccatcagaccagaccgttcgagccgtgcacagcaatcccaaatactctatcggcacgatatgcctcaatccagcctggtggtcgggtgccaatttcccgcgggacaaagttcgagactgtgtgagcgagcgcggagtcttgatgcataacaaggtgagtacttccgcggtgccagactagtatatcgattttttactaatacacaatccttccgacatatagattgcctttgtccacccttccaccccgatcgatatgcccgataacaaggagtgccgggggtgggcttatgtggggagtgcgaatttgtcagagagtgcatggtgcgtacatatctatactccactcgctgtaatgacaaaactaacatgaaccaggggtcgtatcgtcaaggatagcaagacgaaacagctgaagataagctgtcgcaactgggaatgcggtgttatcgtgcccatcatcaatgagaagaagactggggagaaagataagggacctgaaacgcatggaaccgccccttcggcttctctcccagtcgagatctttacggataccgttccagttccgattaaagtgcccgctgtcccattgtccgagcacaggaagcctttcttctttggagtttgattcaacctgggatcttgagattgcctttgtttactctacatctgagtcagatcgatgtctacatctgcaagtccagtgagaatctgattttactaatcttggcatgggtatctgggataggagttcggatcgggttacttggttggttcaatgaaacgaatgaatggcaagggagttgaaagctgtatgtattatctagcctttatgctgtgatattcaacgagagcaaacgagagaaacagtgaatgtcctaaaaagcaaagttgtatgattcaatctatgtaatatgtatgtttctaacccaacctgttccgatatatctattatgacgctctatgtaaatgcatggtgacaaaaagaaaagtaaacaaaagaacaatttccaaacttttcaagcctagttctcactcttcttccccatgaacaaccccgtcacgcgatcagtcatcagtccagcaaaaccaaacagcgaagcaagaccaaagctccagcctttcacacgaacggtgtagataaagaaataaaccaaagcccagttaataataacataagcaaggaaaatgccaaagcagcgccacttatccccgatatgaacattcaagttggccatatactgcgcaccatccttgtagggacagtactgacagtcggccgtagcctgggggttaaccagatacccgaccttagcgaaagaatcgacaaagtcacccgcataagcatcacaggtctgtccaggcggggggttgaaatgggtagattccagcgaggcgcagtcaatctggacatctggcagaacagccgagagcacgccgcgcagccaccaggtaaccgggttgacgtagtacatccagtatttccagaagacggggtaagcggcgtagggacggacgataccgttgaagaggttgatcattgtgaagaagaaggggagggtgtttgagatgacggtgaaggagggcgcgaaggcgcagatccactggccccacgatgcctggaagaggaagaaaagcatggtcatgaggaagacgtagccggcgtttgaggagtcggtggggaatccgacggggtagtaccagagcagccagtagatcaggccggagatgatggctgcggggatctcgcagatgatgtttgcggtgcagaaggcgacccagccgtagatgcgggatgggtattcgcgtgcttcccagagggcgcggttgatgtagaatttggggacaatggagttgaggacgatgggcgggatgaggacgattaggaagacggagaacatgcggtcttgcattgaggctacggtgttggagagcatgtagaaggtgaagccgttgaagatgccgatgatgatggagacgaagagtttgccgtagtagtaagaggggtcgcgccagtagttcacgaagaggcgtttcgtgagctgggtggtttgggtcattgttgtggcggcgaattcgtaatgggcggaggcggattcctcgatggggagtttgctgcgctcggtgcggatgtgttcgatttcggcgagcacttcttggttttgctccgagttgcgccattcttcgttccagtcgactagttttccgtcgcggtgggttgctttggcggcggtttcgaggatgaactcggcaacgttctttgatggtgggcagacgaagccgcggtcaccgaagtacttgattatggaggagccgtctttgccgacgggaccgaaatagaaggtgttgccgccggggttgagggcgaggatcatgtcgaattgttggatgatcatggaggagggctggtggattgtgcagacgatggcctggccggcttggcaaagtttcttgaggaagcggacgatggagaatgcggcttgactgtcgagaccggaggtgggctcgtctaggaacagaagcagactaggcttggctgcgagctcgacaccaatggtcacgcgcttcttctgctcgacattgagacaaccgataatggcgtcctggatatcctcgagttcgagaagctcgatgatgcggtccacgtagtccattttctcttggcgcgggacatcgcggggctggcggagaatggctgagaactcaaaggcttcgcggatggtggaagtattgtcgtgtagatccatttgctcgcagaaacccgtgccacgctggaaatcagcacccagcttgtggccatcgacaagcatatcaccagtcacgacacccgtcttctggcgctgggccaaagtattgaggagagtcgtctttccagcaccagaggcacccatcagggcgatcataatgccgggcttggcgtaaccgttgacaccgttgaggagcttgcgtgttccgttgccgtaggggacagtgtattcaacattctgccaggtgaagcagcgctcacttgaggacagtcggttgaaagtggcaccatcatcaggagaggtctggccacgggcaagagcagcgttgtcttttgcgttgacgaccttctcttcatcgttgacggtgctggtctgggcagtgactttcttagcgcgcttggactttttgaagaccagagcaccgcccgcatctccaccaaatgagagagtctcggcagcgatgacagtcaccaggaggtacagtacggtgaaggcaatgacaacaccaaagttacgccatagatggctgcgtgtgaactcaaagttggcggtcaagtactgagctccggtaacagatgattcacccaattccgaacccgtcagagcacagccctggtggttggaatccaccccaggaccctgtgggacaagctgggatggattgcattgcatggtgcgatcggagaattcgtttgtcaagactgcctcgtaactgtacgcgatggggttgacatagaacagccatccgaaccagatcgagtccttgatcagagtctgcttgggaatgacataaccgacgaagataatgagcaggttcagcgcgataccaccgaaacgcaccgcgtcatcgatggtcggagacagcgcagcgaacatgcggtacatggaagtgatgcagaaggtattcgtgtacacgaacaggaagtagatgaagaacttggaagccgagacatcgagaccagtcatgaaatagacgataatcgtgaacgggacgaccatggagaagataaaagggaagtcgacaatgacgcgggcaatggagacagcagaggggcggtagaaagcgtaatccttgtggcgggcgacgataccacgtccagtgacagcaggcatcagctcggtcagttgcatccagccaaggaacagaatcgagaagaacagagcaccgctacgcgagaaagcgccgctggtatccagggactctccgtagaacaaggacgaaacgatgaggccgttagagacaacaatgaagtacttcgtgcacagagaagttttatcgccccagagcagccagaactgtcgctgcacgcaggccgtgacctggcgcacgaacgagacggtgtatggcgacttcttggagacagacttggacttggactgtgcgaccgtggattggaagcggcgggtgtcctcctgcccggtgtcttggagacgtttctcgtacccggagacatcctccaggatacggctgtaggtctggctgttcctgaaggtgttctcgagttcctcggcggtcttcggggtggacgcttcacggccaggctggaactcgcgggcattgggatcgcagagcgaagtaaggaagtcggccgtagtccattgcgcggggcagtgaaagcccaagtcgacgaagtattgtcgtgcttcattggctggtccttggtagagcatgcggccctcgtcaatgactagcaccttgtccatgagctcgtaaatgccctctccggcttggtatagcgtgacgaaggtagtgcgcttgctgacatcggtcatgatgcggagggacttggcgtagtccagtgcggtgctggcatccagaccgcgagtcgagttatcccagcagaccactgaggacttggtggctagggtctctgcgatactcacacgcttgcgctcacctccagagacaccgcgtacatactcgtttccaacaagtgtattcctggtgtgagtgataccgaacatcttcagcagggcatcgatgataatgggaatgctttcccggtcctgcttgcgggttttgttgataagggagaacttgagagtttgccagacagtgagcgaggggaagtgctggtcgtcttccgggttgtagttgacttctccacggaaatgcttgtgctgatcctcggacgagagaccaccataactaacctcgccatggaccccagcaaaagcaccacggtcgttcgcaatcgccttgaggaaggtagtgcaaccagcaccgggacggcctagcaccagcatcatctcaccttcacgcacagtaccgctgaaatcatggattagatcgcgaacaggagggtgcttgccgaaccgcagctgcggcacgaacttgcagacgagattgtacagatccgggccgaaggtgccaattacagcctgggggagagtgcgcacgaaggatgcgccagtctccacgccttgcacggtaaggttcttgaagacgacgccaaccttcttggcgggttcaccggcggtcgtgcggcgctccagatgaccaccaatcaggaagtcactcaggttgaagccgccgtcagcctcgtcctcggtctcctcttcgtccttgcccttttcttcatcgaggcggctggtctgcgattttgggtggcgaatgctcctggtgacagagcgggtgcggttcaggctgagacgggtgagctcgcggcgcatctcttccatgtcctccatcgcaccgctgcgggagacggcattcccggcattctgctctccccagccgccatcttcgtcacttattgacgagctgaatgttgagctgtcggttaaagttgggtcgatgggagcttcggtgtgaaggtgttccgtgggttgtgactctgcatcatggtgataggtctcaccggttgagctggattgttgtctggagggctgagtataggcttgggaatccgaggcgccatacgactgttcagaatggccctccatgtcgggaactgggtggcttctactctccggcaacattcaataacagatgtattatgctatagccaggctaattaaggacaggatatgcacagaaccaagggggaagtaaacgtaaagtaaaaggggcagagttggaagggaaatattcagaagagcaaagagactgcacaccgtttatataaatgtcatagccctagggcatttgtcagtcaggaatacgaatcattccaggacccttggaataactcaaacctcaggtcgaatcataagccagacaatgagtcctgactgaagagctatagtgggctatagtggagtggtggagtgtacatgactcaagttgactaaagttgacggtaaagaattttatttcaagcttccccggagataagccttagctccgtattgagccgatccgggctggtgattggctgtttccggctgctcatggacgttcattggctgttcgacgtgtcattgggcggaatatccattcctatcagtctaggcttatcacgtggagccggcttttatattccgtttcgtctcttttggtttcttatacaccgttataggaggatggattagcaatcgtgcttacgaatctgtttcgtagggataatccgtgtaacctccgtgtaaaaaccatgtaagaaccatgtaagaaccatgtaagaacccccagatatagaacaaagaattggatatcaaaccgggcttgtatattgccgatgtaattcggcgactttccaagatttcattgacccactcggctgaaagcatattccgactaatctgacttcatgtctgatctaaataatatatatggtcttggcttttatattgttgagagttccatcaggttctttttaacatatccttggtagcatcttacacaattgcctttttcaaaaagaaaccctaaatcccaaccttcacacttaacttgcgtccaggggtccccgataagctattatcaaccatgcacctccacgttgctatatcacatgtagacctgcaggctacacctacttttgggcatccatgttgtttatgtatatcgcactccatagaaacctatagaaatgcacgtgcatggtactactacgcgcaatccccactagaagatacggtctggctcgagcaaaagtccaacattggaatactatacaataacttctaacccctacttattttgatcgctacttacgcttagcagcagcttgagcgatccgcttctggatctcttcctttgagaggatcttcacggcgttgttggagaagacatagctgagtccagaccaaagagtggtgccggcaacaaggtacctaaaattggttagcaaaaagaaacaattcaaaagaaaccgcaagtaagaaaaaaaagaaaaaaaaaaaacatacaacagtgaggattcgctggtggtcacccacccaactactaactcaccggcgnnnnnnnnnnnnnnnnnnnnnnnnnnnnnnnnnnnnnnnnnnnnnnnnnnnnnnnnnnnnnnnnnnnnnnnnnnnnnnnnnnnnnnnnnnnnnnnnnnnnnnnnnnnnnnnnnnnnnnnnnnnnnnnnnnnnnnnnnnnnnnnnnnnnnnnnnnnnnnnnnnnnnnnnnnnnnnnnnnnnnnnnnnnnnnnnngcttaagtacggctgagcggacgggaagccctgttttccacaccctatggtcgtatgtaccagaaacagcctcgatgtgtcttaggatggaccatcgaagactgctcccatacacaaaaagaaaaaagacaaaaaagacaaaacaagggtataaaagaaaatatcaaacttactggaatccagtcatagcctcgctcaaatgccacgcactcacaaacgcctcggggaccacaggcagcgcaatcgcactacccaccaacaccagctgtagggcagtattgatcttcgaaatctcagtgggcttgacttccgccgagggaagtgagaaatcccagtaccgggccatggtcttgggctcaggcagcgaaatccaacggtaatagatagccgaaatagccagacccagatcgcgaccgaggatgatcacagcgagccagactgttcgatacgtcaatccatgtccatgtccagataccaaagatcaacacgagtgacttactaggaagagagccattcacggccagacacgcgacaccaatggtcatcaacagcttatcggccatgggatcaatgatcgttccaaccacagtttggaggttataccgccgggcgatgtacccatcgacgagatcggtgatgcctgcgtaagcgaacagggataacgctgctgtgtggtagttgtggactaggagatacccgaccacgggcgcggccagcagccgggagaatgtgagaatgttgggcacagtgtagatattctcgtgggaggttggcaggggaatccgtgatagaataggttttttcttggattcctcgggtctaagctaggttagtcgttggttcgaatggcttatgtcgatttgtatattgaatacatagtttggagtagacctactgttcaggagatttggctgattttgacccggaccatctttgctgggtgaagaatgatggtgcaatcagggttgtctgaagacaacgaggtttcaatctgatgaataattagaatgatataaatgaagaagtcacatacgaccatacctaggtgatcggttcaatgttgactggactgatgtagatatacatcggaatccatctctccgaagagattcagttttgaacacatttgactggacaagaagacgtgcatttttggacagcacttgggatccctgccggctcgcccgaagggacaactgggctgcgtatgagccaatcatggtgacaccaatataaggtgacagcggcaggtgttgttagaaaacaaaaattgacagcgacacgataatcacaagctttcaactagcaatttcagctgtgcatacccggtcgtgttcaggctatgcaatggtgattcggtgcaagtgatagaaagctgtcgccttgcacagttgctggtaaagttgcaaattcaaccccacaccaaattaaaccaagtatcaagctgatagcgcaaggaatgcaaataaacagacacaatgctatatagtacaaacacaatctagggattgttagctggatgtgtcggaattcggggcaacttggctgagcgggacatacatataacagaactccaaatgcagatcagttctaccagtaaatcaacgagctagaaccaagagctctagatcacggtcgcctgatgttagatgaactttggagattgcacctcggcgatgagtttctggccggataaatggtttctccgcccgtctctatatcgcaacttatccttcctgtgggcgtactttttctacattcatctatagaaagaaatatgacaatggatttggctgttaaatcatatcctaaactgatagtatcatctattggttcccgatgccaggagccgcgtcaggggatcatgatcaagcctctgctcacctgatatctgtacctgtgacctagaaccccaggtgatgaaagacacattgaacaaaatgacgacttatgtctaagcagtcagtaaaagaatatatatgttaatctcccacacagatgaattcaaattctcgcatctacgtctagaagaagccttagagccagatggacaagcaagcctgccagaacaaagctgcggtcttatctttgcgtcgccacgatgtcacttacttctatccgaactgggtgtgtctcggactcacgctcgttaactccaatctgcagtgtaccgtcagccaaaggaaaggaacaatcagatccaaatatggcgaatccacgtcttcttatcaaccgtgccctcatctacgagcgccgactacctggtgatgcttatatcaccgcgaatgtccagcgcctccagcatggatattactccagtgatgccgtatcagatggggacgctgaacacgtagattttctcgctattgcattcaccttccattcgccccacactatcgcgcatcgcatcaagtccgccactatcagtgtttcagttcgtggaagccgtgatctttcaagttcaaagttgtacccttttggatatccacccggtaacccacgcttccttatgcatgcgccacatctgctctacggcagtgtttctccagagaccatggagtggacattcagtctggctgggtccctcggaatttcagaacttcccgtcagcgcaagcgtcattccctcggggagcttcaatggtcggtacaagcggtacgagatgatgcgcatccaaggctccgcacgtacgttaaaaagcccatctggcagcgatttcgacgtcgaagctggcagcatcgtttggtccatggaagagaacaatgtccagcgatccggtctgccgcgcgagttcacctttgtcatgttgattcagaaacccacagcaaaaagcaagatttccctgtcgattgacgtcgacccggtcatcgacgcgatgattggcagctacccatcattgctgctgaaactgcctgaataccaacctttgccgcgccggggcgtcaatttccaacaagaagttggacagcggtttgaacctgtggacccggtgcgcgggttcaactttgcagacctcgggagcatgtttgatgagtacatcgccatgccaggaaggaagttcagccgtcaggtatgttcagcaaataaataaaatgaaaccctcaatgcatatgaagtgagccgaaactaataggtacttctctcagatccaaatcccatctgagaccagcgtctctgagaatcaccagggcacctacccaggccagcaagggtctctaaacctaatcccgtaccaacaacaactgcagaaccacaacctggccctgcagagcaataacctcactttgcagaaccacctcttacggacaacccttagaaccctctggactacccagccgagggaagaaacccaatacttcccactcacttcccacgctcatccaacaccaacaccaacaccaacaacctccaccaccccccgagcagctgccatcacaatacctctcaacctgcatctccacatcgaccccgccacaacacacctcaccaacctggcgcggacaagcccaggtccctcccccctaggcccgcgccgcacaccaagcctacggcgcacgcaagcgcgggaattcccaaaggctcctctccacacctaacagagtcgatgatcccacacaggtgcagcagcggcgccgcactctttcatcttgcctcaagggacataggctgtgtgcctaatggatgtatttatatatgactaagcacgtgagcttctttcgtgaccaagaagcaaagaagtcacggtttacttatatatggatgagatcacactggaatatgggggtcgcctaaacctatcgacgctacgatctataactaggaagacttccgcctcagagagagaggtccggaagaagcgcatggaaacaaaaacaaatgactacgccacacctctctttaaagacgctgattttagcgagtggtcggatattcaagaaagtcgactgaggatcgtcccacaactattcagcgctatgaattgtctgcagtatcttccgttttgccattacaatatcatatcaccgagcagactgcagacgagaactccccactcttctggaaattctcgttctatgtggacgtcctatgcacggtacatcatgggattccaccctaggagcgggaataaattcagacaaatcatggaccaacccaacgatatcacggaaacctgggatgctaaaaaaaaccaacgccatatacaaggacagccggaccggccttgtaaatacggccgacgcacgatggagcgccatctgggacagaccaaacggacaacaacacgttaattagcactttagccagatagaagaggtgatacaatatagcatttccgaacatcggtatcacctacactcttctgttgtaacttgttccccattacactactttcgaggatttctcagcctcacttgttttggtgatgctatataagtcaccggattattgtattagcaggttaaatgtttactacctataaagcgagaagctgcaacctgagtgccccacgtcaaccttcctatccctcatatggctttcttggttggcactcctactgtggccctgtgaagatcaattccgacgagtcagatagatcgcttttagtaaatgcgttcgacttgcgagctcctaaagcacaaacgtaagacactgccacccatgcctgggccatattttagacctagcagcagctaggtcttgaagccgaggtgagctagaaggggtactccctggttagtcgctcgacgagcctaggcggagagcaagctgatttgcattctcatgtgtattcttgagacaaggcctctggtttctttggaaaatcatactgatatatcattagttgatgagaattttgaagctgattattggataagagatctatggcccacatgctttcgtgacatctcctattgaaacgtatcgtaagagaagaaggggccctaatccggggcctcttcttgtgattgggctcgccgttcgttgctaccagcacctggttggctgtccccgcaccttgatataaatttgaaggagcgcttttttgatcgacttacaaggacacttccctccaaatcttcttgaggatagttatatgtgaccacgagctactccagacgcgaacttaagtcagtttatctcggatactcattcttcttaataatgtctacttttcacggaagcgattcttccaaggaaccaaatgcctccgactactgcaatgatgctactgctctacctttacgccatcttcaaatgagcgaaactacctccgcctctgacacgtcctcaaactttgcacatatacacccttcgtctataccatctgagacaaaattttgccttccccagttctcagcttatccatgggctccttatctgacaatgccgaaacatccgctcgagatgactgtcgatactcacgcaaacccttctacattcagtggtcaggctgtaaatagcgcgttgtccgacacctggtctacaaataatccgttaacgagagatactcaagtcctgtccgcggagagcactgagccccttagaagcaggtatgtctccaattcatcctttcatagcaaatcgccaactgcctcgtcctaggaatacaaaaagaaacaaccaattcaagtgtggttgggagaattgtaccagctctggaggattcgcatctaagtcctctctcatgcgacatatcgaattgctgcatgtttctccacgtggattcgcatgccctcattgcagaaagtcctttaacaggaaggatcagctccaggcacacagaagcaccgtacatgttggctggggctaactggcgcgtctcaaacgcaggggtagtgtgtcataacttgagttgaagattgattgttcagtactgcaaaattcttatgctagagagggactagtagcaaaacaatgtaccgcacaagtaaaatcgaaattgagttatagtagccacaacaagaacaagcatctttgtctaccagggtcagttctctatgtaaacaatgcagccttctatttgatatcaaagttgtgtgagcgaaggctgtgtatgccaaatatctcaagcaagatatgagagaatgaaagaatatcttgccagattattaggattcctttttgttttacctatttgcacgatggattccatcggtttctacaagaaattacgatactataacaatgactcattgtgcagagcctataatccatactatagacggcgggaatcgagtattcagtacacgcacgtattgataaagccgcacctgccaagaaaggaaaggaagaaacgagtatggaagtaatctttgaccattgaaccagtggccattgaccatggaatgagatgggaatcactaaagcctgccccgtgtgggagtatagaacagagaacagagaatcataccgagcccgcccagaccagacgttggaaaagaaaccgttggacaccgtgatcgtagaagacaaacatacaggcgcggccttggcagcaatagagatataagggtcagagagcaagaggaggaagtagaagagtaggaatcagagtccaaaggtaaaagaagtagtaataaaaaaaatagaaccgttttggggttatcgggttgttgttgcatgacatcgtaaagaataagagaacgccacccacccggattcccagaacagaatcaatagagccaccgaaaggaaaaggagcaaagggggtaaatagaagcaaaacaggaaaagcagaaaagacaaagccacctccgtagaccgtaaagcaaagagaccataaccatatagacacgagtgagccgctgtctggtacatattgtagcaataaacggcgttttcctcccaaacataatagaagcgtagggtctatctccaggcaaacaaaaaaaaaaaaaaaaaacaaagaactcgaaaaaccaaaagaaaagaaaattccgcccggactcccacgctccatggccataagcaacaaagacacggaaaggtatcaagagattagatttgaggttgcgccatttgcggttgcgtcgccgccgtagtcgtccatgtcgacatgggttgcgtggcagcataaggcccagggacgtagtactgggagcgatccgtgttgtagtaggacggatggatgggatttgattcgcgacgaggaacgttaggatcgagaccaggcatatgccgatcgagggctgggtgtgggttttccagctggccggagatgctgaagctgctgcgggagtaggtggccggggtggatggatccatgggggaggtagcatctgttgcctggctgcgcgaggagatggaagagttgcggtaggcggaagggctgtgttccgaggcggatcggttacgttcgttgatcgagctggggagtcccgcattgatgccacctggaatggaggccatgctgtgtgcgctcatcgagtccatgctgccgccgtagggccggaaggagtggtaatcttcctgctttgggggaatggcggtctgtcctgggtttggcaggtacggatttggcgcggatgggctggccatcggcgcgcccatggagtatccctgaatcgggccttgctgcgggggatgtgtcgcggcatacgggctagggtgcatatagaagtcgtttgaaggggtgggcatagcgtaggcgggtggggccatcatctgcgggcgatatccgtatagcgcggcgtgggagggctcctggctctccacggcgttggcctctagctcgtcgatcggagaacggaagctttgtttctgggtgagttcggtgcggggtcggataaaccgtagggaatccaccatggaaggtgggttaaggataccgcgcatcacgtcctccacactgtagtatgagaccaaatggtgggtcacgcccgagactgttacgctcatcgtctttttgactaaccccgagtccttgaagccgtaggaatcaactagagaccccaccaatgcccgttcgagctccgattgatgggacgaacggtccgaaaaaggcgccgagttgggcgatgtcggagaatagccctggctgctgtcatgtcgcggatacggttcgcccggccggccggcgggcactggtcgccgagtggccttcttcatggcgcgcttcttctcccccggaggaaacggcttgtccaactcacggtagaccaggaagttccccagaatgcgactcgggctccaggtgactccatcggtccagcgcttgatgcccgaggcattctcctcatagatgaagacgctcccgctgcgcaccagatggctgcgttcccggtcgtgagggcggcgcgggacatgatgcaagacaccggtcaagcatgcctcgaaaaggattagggcgtcctgcgtggttgcgacatacccggtgaatgtgggctccaacacggcggcggtcccgttcaccatgatgtagtgtagtgaaagagatacaaagccaggtgcgaccccccgggcttttgcgaagtgatatattccccgaacgatccaacggggctcaaaagggcaaaaagaaaaaaaggaaaaagaattaagctaagagatcgaccagggtatggagaagaagaggaggttttgagttgggacccctcagttggagaaattcccagggatcgtgatcagcgagaagcacgggccctcgagtcgagtcagcgagtcaacaggttgcaccgattcgatcaggaaaagatggggatctactcgaaacccgttccacggtttgagttgcggcaattcccaagctttctttttttttgggggatccactgagagaagggagggaagggaataactatgtacctaaacggggaccctggctagttaagcgagagaggggaagtagagaatcagaaaagaaggggggaggtctgagtgataactccacagggaaacatggtacaatgataatcattgattagattatggattatttattggattattattattatattcataagttatataagtgatataagttcaacagaaatatctatgggatagacatcgggagtctaatggctaatgttaatgttaatgttaatctcggagggttgaactacttggtcgaaggatgagcctggagtatcaatgacagatatgacatgcgatattatgttttgagctttattttattttatttaatttatttttattcctttttatttcctgatttattttccattttctggattcggtctagtcgacccagaaaagagaaaaagaaaaaagaaagtggaaaccaaataaatcaaataaaataaaaaggagacggtggaattcggaaagcggagaaatacggagaatgaaacatcaaagtcatgatttcaccaaaccctccgcgaaagcaggtacagtttcacttagttcgagaactgaactagaactagaactatttatataggggcaatcttatcaaatattattgccatgaataatagtatatctacgctctcatataatgagctaacaagcagaatacaaaaagaatagaacaggtcaagatacaatcaccacccccgtgccatgggtgatccggtggagccatggattaggatcggagggtctccgtgacatcgtatacaacatacatacaacataccaaagacaagccagtagattgatgttgtatgtactccgtagtcaacggacttaactcgctgttgagtctgactcatcaaacacctgcctatttggaagagaaagaaagagatcatctgtgtctttcgccaggcagcgtaaagtacagacggcggccgtccccgtcctctgattggccgcccaaccacttcccccacttttctcatcgacgccccatcccagaaaggatcgcctttggtctcagacaacctcaggaacctcaagaggatcccaagggccaatcctccgaagagcgtcatatctcggggcgtaggtctgtgcacgccataccgagctattgaacttgggatgggtcgccgtccaacggcagtcaaggataagatcctcggtctggagcagccagtcagaagcgtcagaagcgggtcgtctgccctcacacccgtggacgggggattttaatataaaaaagaaattccctttctcgacatcttttctcttttttctttttctccgggtccgggtatcggtgacttctggttgggttatccgctgctccatgactggtttcccatttggaccaattccccaacgaagaggacgaggaagaggactgagcgcggccagttcaaggtagatctccgcctggacccgtcgattcggtatacaatctacgtcgtccgtaccataatgtatcccccgtggactatatatataatgttcgggtatcgacccgggtcactaaacccaatcagcatgaacggatgaacagacccggggacaccacgcgtcgcagataagaaacaaaaaaaaagaaaaccaaaaaaaagaaggttaggcttccgggcgagagagttttcggtaacttcacttttactttagtttttttttcctttgtcctctatctcagggcgtgaaagttaagaggggaagagggtcccgtaaccaatgcagaccaagaaatgacgactggggttggattggacggccaaaactttcgcgggagatcctcagcagatccaggccatgccacgctgccacgcacaaagtccagacacgggtctcagccacggggccacctgtctggctacgcaccccggtcaagccacggggctaaggattagatcggcgggcgattgagggaattattcagtacgagcaacatacatcggacataggacaggaagttgatccattgtatattgtacatagatagcggaggacagtgctccgtttaaagtcaggtcccagaggagtggtcggccacgcttgttgaaactcaattggcgcgaatgacagatgtcaggatataaacatttagtgtcgagatataagatagggctcgctaaaataagccagtacgtacgcaatgtgatgtatcactccgtataatcgccgaagtccgatagcataagaataggagaaaccaataattcagaaaccaaagcctggaccgaaatctgagatcatcgatattctgcacagcccatcacaagcccaggatggctctaagcgcgggaaggacacagcaaagaggctagcgttggcggttagacgtaacaaaggtacccaatatacgagaacaggaaactatttacatagtgtggtcggagcttggcatttccaatcgaattaccccacaaatgcgcgagcaaatcacattggaaccgagggagcaccagatgtggtcctatcttaaatagacgagaggcgttttttccacggacgatctcggtgcccattatctttctcgattcgaagatctcgactcataggtcctccgtactccgtactccgtactttcgagtcgatcgctggcctgcgatttgtcgacccacacaaatgcacacacccatacccagacactcggggccaaaagaaggattattagattacatgttttattataggtgggggatgtggaagctaagacgcttgaacgggtaggtgaatagcgattgtaataagcaagctgcatgtcaggtggagttttcgctactgaagaaaaaagaggcgcatctaatttaattccattggcactacatcaacctggacggagtactcagaaatcagctctagacccgttagggctagaatcggcgccgatacgaagatcgccccctcgaactaggcactggatgcccccggctaggagcaggagacacaagcacagcggcagccacacagggaaagaataggcaaatgcacgccccgtgaaggaaaacacaacccgaaataactcgcactaatcgcactagtctcagtggcgtccgtactatgctgtcttggggacgaactaagataatgccgcaactctctcaagggtctagcactaaggggcgatcatcattagggaacttggcgtcgacgaagatccggtttggtccaccgactggatggtttcgggggattgtagctttcacttcggaggctcggggaaactatatattaatctatgtatagttaagattgggtatctatagttatccattctagtcgtagatagatacaaggtacaatgaacctacggagtgcagaagatgtgcatgcctatgcaatgcaccagtatcacacccttccactatgcaccgtgccacaagcacaagtccctacatccaacctcgtacagagatcatgggaaagcacaagggcaatggcaatagacatagacatggactccgtctccgtactacctccctaatccgtccacaaacccgagactgttcgggacctgatcctcttacccgcccaggacaatagcctggcctttctacccctgattctgggtgttgcctattggctgttaagattccacagatattagagaattgttttatagaattgctcatttgctggttctttgcacggtgtggagcagtagtacatcagtagtacagtgctgtacccgacaatcataggacagcacccaaggtatgtggttgaaggtatgacatggcgcacagtggagagaaacaattcgtcgtcagcctcagggttgaatgcgcgatcatggagatcgtctatttattccatttcggggaggattagtggatgctctatccgatcgcgcttgtgtgcatggaacattgaacaaaggactagttctcaggtacgagtactcgtactccgtacatgtactccatccatatccatacggagttctgcgcacggagtctcccgcaggaggcaaaaggcaggcaaaaaacaggcaaagaggcgaatacgcaagacatggataacattatgatgtcgggtcatttgtatagcatagttcaagcatcgcctccacctcgtataatcaacacctcgaccccgtgatcctcgtgtcaaaccagccgatcgggtagaaagaaaacataaacgaggccaatgaagctaaggaagccagtgcatccacttatttccactattagttaatgttggcgtgtcacacacaagggatcgctcacgcccatgtggtcagaaggactgttggaacttggcacccagcgctacggctcgtatctgatttgtgcgagttggatcctgtttttgagcaatcaaggttgttgtattcaagattgtatatgggacattgaagcaggtatatcctacattgtagggattataaagcatgagtaactatgttgcaatctctagttagggctttacttatttagggctcgagtacttgattatgggaaagacatcaattcttggcatctgtatgaatattgcagctatgtataaacagaacgacctttctcggcttccgttttccgctttcttatttcccccttaataatagcgagacttccacaaccgatggtaggaagccgatgtaactagctacaatagttatgggatcaagatgtatcaaaatatcaattgatccactattgaaactaggatggctaaatccagccagataaaatagagctcgagacttccaaaagtagagtgcagagtctgatatgaataccaacagttcctacttcgccaaagtccgtcttaaatgatctaggggtaaagccaagcttataacattgcaactcaattatatgcattaggggaaagtcagttagattgctatacaaagtgttctccgtaccgcaaccttaagacatatggccatgcatcgacatagtggacacctcgccatccaaagcattgggatctatgacatcagtcaaaacccactaacgattttcaagatcttcaacgacgctattgactcattaataaatggcgggctcagggggagctactctaaacctctaggaatgcagtatctaactagcctcggcgattcaccttcttttgtaataattctcgctacggtataccttcctttgacgcacattagaagaatgcgaatgcgaacgtacggagtacatctgactcgggatccactaaatagttctgttcaccgatattgactcaaaaacagggccaaagcgaactacgccgttgtacgcataaagtactctatgatatacggcctcggtctgttgtatgtcgccctaagcactgcggcatacatcgtctctctagcgccgcgcactattatcacaataatactttccatcttgctatgtggagaccaacatggatatcatgcacatctatggagcgtcgccactatcccagcccagctggaacgtgttcccgtccagttcgcaagataagacccagcattctagaaggcaaatcctgacatcttctgccgacccgccatgtgcattcttcacctgcaccttccctgctcagctgccaagccgtcctagaagattgtgctagttggtgcatgaccgtcggcacataactccgtatgtacctagttgcttttgcctcatgcataccacagaatccatacaacatacatgtgcggagtacctacgacaggattttcctatagatctgtaagagcactaatagcagcgacatatgacacacgcaaagaagcgggctagcaagcaaggaaccatccatcccccttacgaacccgagaaacactcacccctcaatagccaaattgtacgtgctctgagaaaaaaaaagacgatgtactccgtactccaacagcgcttgcgaaagaaaaggatgcatcatttcgatagctcgaacgcctctcgccgatccactacagcttacccatcccaacgcgccccgcccttccgccgggtgttaactagcggcgatgagatttgtgatttcgcactcgatatacatcacagtaaccaaccaccaatagaaaaccctcaacaagcgattggcgtaaccgtttgttgggaaaaaaaaaggcaagagaggtgaggtgagatcagatcgcggccaacggcttatgcacgccaccacctctcccatcccatcacagcaccgatcaaagcacagcgtgcatggcgtggtagggacgtgcttgcaaaaaaatcgtgattcgtcatgtacgagacccaattcggtaggtggttgttcgtcacatctggacgaggaatgagattggatggttcggatacgcgctgcaaccaggatcacagatggtggcgcggtggctttttttttgcgcgggcctaagcacctaggtctgtttatttcgagggccaattcggcgatgcagtgcatggatcaggggaggagggatggttcttgttatgctgttgtggcctgattcggtcataggtacctctcctccccgggtttggtatatccctgtcgcgagaactggtgagtgtgtcgttccatatgttcccccttgcttgttttttttaggttgggggtctgattgggcttggtgcttgagggtacgtggctttttatccttgttttttggctttttctcgcgtgttcggttcaaggggaggtggagtacagggtatgttgacgtctgcgttgggttaggtgcgtttttgtagatctatcttggatgcttgtcttggatcggtttatgctttcgatttagctgtgaggttgtttgagacccttttcccaatctggacaggtactttggcactttagtgcggcttgattgatgaagaattgtgaatattccatatgctggataataaatatgcaaagatgcacatcgcagatcaaatagtatacatgttgatattgtacagtcaaagcacatgcgccgagtcccgctatgccaatataccaaagaaaagagagtcctgtcgagtcatgtcgtcatgtccattgcatggaatcaaggagacgaacggatcacatcctcaacagcaaggtcttctccttcgacctccttagggaacccactacccctccgcacatgcatcagcaaccgcaaagcaccaacaggcgtcacgccttcaatgcgcttggccatgccgacactgataggccgcacacgctccaggacctgtcgctcctcgttgctgataccgtgcacctgactgtaatccaaatcccctggcagcagcaagttctcgtcctgttggaaccgctcagccatcttctcctggcgtttcatgtacggcgcatagcggccttcgatagcgacgcgggtgaggatctccggcgcaaatgagaactgggtatatgtcttccccggagactcgataataggaatgagggtgttgatgtcgataccgtccagacacaagatatcgagcgctgagcggatcgaggtatcagagcgcaccttgaagcccttgcgggaccagacagacgacgagagtttcgtgttgccaaggagagtctgtagctcttggatctgcgcttcggtatcggagaagtgacgccaacgcttgtcggagacgacgccggcatcgcgggccatgcgggtcagacgtaggtcggcgttgtcggagcgggtggaaatgcggtattcgcttcgcgtcgtgaacatgcggtagggctctgagacacccttggtaatgaggtcgtcgatcatgactccgatgaagccgtctgaccgggtcagggtgaggggtggtcggttctgcgactcgaggccggcatttgtgcctgcgatgatgccttgtccagtagcttcttcgtagccggtggtgccgttgatttgaccggcaaggtagagaccgctgatcaatttagtctctagggttggtcgcaggttgcgcgggtcgatgtagtcgtattcaacgccgtagccgggctggagcatggttacgttctcaagaccgcggactgttcgcaacatggcgtattgggcgtctgcgggcacagtcattgagatgccgttcgggtatatgacgtcgtttggtgcgaagccttctggctcgagccagatctggtgctgggtcttgtctttgaatcggatgatctttgactccagggagggacagtaccgtggcccgcgcacagtctcacggatgtggatggatttgtccagattggcgcggatgatttcatgggctgcttcgtttgtatgggtcatccaacaggtgagctgaccttcgtcgcccacttcaacagttttgttaagataggagaaagggtgaggcggcgagtcgcctttttgcacttcaagagcgctgaaatcgatggtcttcctatccaaacgaggtggtgtacccgtcttcaaacgtcccagttggaagccagcttctcggagggacttgctgagaccatatgtgggggcttcgcccatgcgtcccgaagggaacacatccattccaatatgaatctcaccccctaggaaagtgcccgtagtgataaccacacgtccagtaggaatgatctccccagattccaaccgcacgccaacaatcttgccctgagcaccgggggtgttctcgatgccttcccgggagagcacaatatcagccaccttgccctccacaatgctcagattttccgtgccagccagctcctccgacatataccgcttgtagagatcgcgatcgatctgcgcacgcggtccccaaacagccgggcctttcgaacggttcaacactcgaaacatgacaccagccttatcaataactcgacccgccacgccgtccattgcatccacctcacgaatcatcgttccctttccaatgccgccgaaactgggattgcacgaacaaacaccgatattctccagcgagggcgtgaccaacgcagtgcgcgcgccggaacgagcagcagcagcgcatgcctcagatccagcatggcctccgccaataacaacaacatcgtatggtctaaacgaaccaattagcaagactcttgatgacaacacggcgaaatcacgaaccgtgtgttatctgtaacagtcgcaagaccgcgaccccgacccataaatgagcggagcccgcggttctgacgcatcagagccaccgaccgtgctcgaaaagccatgatgggatgcaatgcgaatgttaccctaaaactaggtacttcgtacaaactggacgatcaaatcgataaggaaaattgtatcttctcacgtgaccgaccttatacccgttaaccccgggcggtcacacatctgacataagcgcttgcgccatcggccaattgcggggctgttgatgttcagttgtaagctgacctgtggtaagctgacctggactttttctataactagcccctcttcgcattttcgaatcttacctcgcaatccgtgagaaaaacccccaaaatgaaggcatactggtatgacaacattgaggtaagcacacaccaattggccgtacccagctttccaagcatttccaggtacagcccacctcagaagaacaacgctgatgtcatctatctacagggcgaccagcgcgagccgcacgactccggtcgcgccgtgtcagaagacaagctcgcctcgctaggcgtgctatacaagcactgcccgacgatcgatgcggtggacaagatcgcagcggagcgcggataccgcaaccgcgacgaggtctgcgtgtcgcctgcgacaatgggcgccgtgtacgaggagaaggttaagtcgttcttctcggagcatctgcacgaggacgaggagattcggtatattctcgacggggagggatactttgatgtgcgtgggcaggaggacgagtggattcgcatctgtcttgtcaaggaggatatgattgttctccctgcgggaatttatcatcggttcactaccaatgagcagaacgtatgtttcttggctttttgtgttagggaatgggactgacttttcttttgcagtatgttaaggccatgcgtcttttccaagacgagcctaagtggacgccgttgaaccgtggtgcggatgttgatgccaacccgcaccggaagacttacttggagactgttgttagtcctactgcggctgtttagagtcgctttaaaattgagatgcgttatgacggattgcacatatactactgaccgattggaatcggaatttcttgagattgtcttatatctttcgttgcatggtgcttttaactgtacatggggacagcaaacccacagtaaatcaatcgaaaccatacctagtggtaggaacggtcaaccgacactcacttatatcaatggtctgggatgccaggcgtccccaatggcgtactcgccggcatggcaccaggcatatcaaaatggtcactcgtagcaccgccgctctgttgcctcgacatactcgagctgcgcaagccacccatatcaacattaaaactagtcgtgcgcgagccagcaccaagccctaacatgcccccacggaaccgcagcccctccagctcccgagcatgatcgtcggagaaccgcggtggtcctgccacatcggtagaactcacgctgcgcggtggtgccgttgatccagcatccgagtcctccccggtccggacgcctgttctgcccatgcgcggccataggtctggaagtccgacaacttgaactcgaggttcgacgacgcgctcctcgaaccatgcgtggactcgcgcttcgactagttgcgctatcttcggtacatcctgcagtcggctgcgggatccgatgagtgagcgcacggagaggtcgagacggtaatctgggaggaaggagaatgcgacgttgcttttcgggctgcttttcggtgggaggtggtcttccgagcttgtgtgctctccgggaccagggggtcgattccctgcgttgttccctgggtctgatgtggggtgcgctggtaatccatcaggtgtttggagtggttctgggggttcggtcgatgctgggatcaaggatatacaaagtgttcctgagaatctcacaactgaaactgacagcgctactggtataatggcagagcgaggtttgggataattcagaaccatggatgtctcgacagcaatagaaaggttgtcgtcgctaaggtcgacatccagtagcgcctgtagccgtccaccgtcggacatggggtcgtcaacggcgatgatgcggcagttgctgaaaatgggaaactcttcgcccaatgagatatcggtcacatttatctggtctatgaaagatggtttcttctccgggttgttcatggccgccgttagcgagctgaggattgacgaagtgggtgagtccttgagggaatatgctgtctccctatactgagcaattgtctgtgcaatgagcacattgaaccagtccagcgactcgggttgatgtgaggagtgatgcatgcggtgtcggccctgcttgctcgtagggttggtaggaatggcactgtagtatgttttgcggaggatggagcgggtgtttgtagaggtagaaggtacagggcgaagaacattcgacgtggacggtttttctcgtaatgacttttggctatcttgaggggggttatagaccgagctattgcggcggtgtgttgtgcggttcgacatgccccgcgatggagggggaggcgcttcaccaaaaatgaaaaacttgatgaaagcgcctatcagtagtactactgagagttggccgagaaggaacccctgggtaaaggacaagctaatgggtgttagcaagatcatatagtccattccatggacagagggcgtacgaggattgagtcgcgtatggcgcgggctcatctacataattgtcagcatacgattcaaaaacttcgagacaatgtcactcactttgttggagcaccattgtcagcggctgtcgacaattcttgtcacaataccatcccagatgaagatgttccaactttcggatctccgaggcttggccgagatcatatctaatcgatatgccaccctcgaccgcctgcctcgaaagatttaaggaagcgccctaacctatttcggggctagcgtcattagcatctataaaatacgaacacctgttcatcctgtttcagtcttagattgggtcactgattgcgatctgggaatttattagagagcatcatccgactgaaccggtcgatctaactatcagtgcccgttaagtgatcattcaatgctcagggtgtgcccgggtctactcagtagtcaaaaagcggcaagggtgagactaaagtggaaagggaaagccaaaaaaatggcaatgtaagataaattgcagagtttgtaaggctaagtccaaatacaacagcatcgtaataaaagcaacagcttcccccctgggcaacctgattaatcaccctaacgcttcagctgactggtcccatttactcttctgctggtagcttcttgtccttcaagtattcacacgacctcgcggttttactgtccttgttgtaccaatattagcagggcatatcccatctgtgctatgggggttgggggttataatgtctgggttgacctttcatttatactcactttggcttttgttcctgccagtttcggatcgtaccttccaatagttgccttgccttttaaagctcctcgtgatttcctactgagttcctcgtcatttataatcatgggtgatctatgattctattcacatatcgctaactctagctcaacctccgcattactatcccaaacggtactgtaattaaatccgcttgggcactcccagctctgctaaagacttcgtcaagcccaccctgaccaaattgtcaatctccttagtcgtagctacagccatgatccccagcattcccaaggaattcaccccggcctccttattaatcgcacctcgtcttctcggcagcacgataatccacctcttggtaagaatcatattatgcggacagactgccccaggcgctgcagttgccgtatagtccccagccaccttcgtagcctctcgcaacaggtctttgtaagccccgaacaatgcagcaggagtcgtatcgccctcaaaacgtcgataaaaccattcaaaaggaaccttagtctcaggttctccgggagaatccaggaaagcagcaaagctgttcgccggcaggggcatcacctgcatatgcttatgcaggcgactgcatccgccgttctggccgcagttgtaaaatgcaacataatcgctttctgcggagctgaggagctgccacgcgtcttctagatcgacctgctcgagcgcctcatattgtcgtttgtgtccatcaaacgtgagaagcatgagatggggccgagcaaagcagaacttgttcacgatcactaagtggctatctagcgcgccgagctcaaacccggtcgtgcttatgtcgctgcctggtcgcttttcggggtttgggatgccggcctctggttgggactgggggctggttagggtgggttttttggcgagagcagaagtcagaacgaattggaacttggtacgttagtggatgtttggtttggattatggttggatgtaatgtactttgaggtcgccgtcaatgtgctcgatgatttgttgtttgtcgtcgtataggacgaggccagattggacgaggttgtcgaatttggcgaggatgaggggttcttccattttgactgttctgtgaattgtgttagacgcaagtgtattctaatattttatggagattgggtagaaattcggtgggagcagcctatttatagtctctacagattgcgtgcacgtccgggatcttgatagtgggattaccattgtttttagggtcacgacaatgggtttttttgccagacagaaaattagtaactagttaataagtaactagttagttatgtagttacggggaatgcgaccccctgcccgagattttaggcatcagctatctctgctgtttcttgaatcttccgccagcaggtttaaattcctgtttacatagaaaaaaatgcaccattctgctcacaatttcatgcttctcacttcaattttattgcccagaatctataagctatgtattgaaggccttgaatacaagaagcccccctcaacttattatgacgtattaggtcacgtgccgcatcacgtacaaggtgggaagaataactacgttaagatagagagaaagaagaagaaagttgcaaacttagaaccctcccgcttagcaatctagcaaacatataaatagcaataagcaagcaaacataaatcgtaggaaaagcggccaggaaagcggtaaacatttatattagttaggcggtcagtcgctgcccgaactatccggcaggagtcccatcggccaaaagggggtcggaacaactatagggggggagggcgccctgatacaataccctaattaaatgcaatcggtaatccaccctagttatggcgtaattgtaagaagttgggctgcgaaatagtcattcgcctcacaatttcaggagatcatcgaatcatctttcttccaatgcctcatcaatccttccagttagccccgcgtcgtcggtcacatcaatggcgatgaagtcatcccgagtgtaagaatacgcctgattttggagccagtgtcccagttgatcaaggataactagacgtatatcaagtgctttgatggcctcgtatgcccactggtggccaaatgatcctttggcgatatcggacgccgaacgcgcacctaccatgacaatcttgcgtcgagctggcttagtcggaattatccaatcaaaagacagtcgaaccttcaagtgttcctctagcatcttcgggatcaatatcggaagctacttcataaggaatgccccgggagaagaaggcaaaaaatataggagagacttgtccccttgagccggaatcggcgcaaagccactgtccggactcgacaaccgaacgaccgagttcacgtattcgagatcccgcaacctcaagtcgagaatatcgctcccgcagagatacccaccatgaggaactagaatcaccttcgttgccacttcgacctcgtcgccggatgcttggattgtgcggacgggatattcgatcggtgcctgcggtggacagaatccgaccaccttcagtggaatttgtggaagaaattctcaagaacagatcaagactatgaaagaagcccggtgtcttcactgtcagtttgaaccgccagcgacaggaaaactttgcaggggctaccgtgacgcaccttcgctgctactcgagtccataggtgctgtttgcctgggtgcttgcaggcagtctcaggcatttgggacctgggagaaactttgtaacctcccgcggtctccacaacgcttaactatatttagtggagtcctcgtggaggctcaattaatttcttttttttttctttgtgcagctgttgccatggtatacctgtcgtacgccataggcacagaatggcaacttcaaatatcgcagtggacacatggcaatatcccataggtgtattctactgcattgcatcccacccctgtcttgcccaaaacgcgcagtgcgtgaaatgaaaaaaatccttcagcacttcgtccgataatgattccaacttgatgcggtaaagcccacattgcaagcggataaatatagtagaatcctttcgtgggataatctatttggcttcgaggggccggcctgcaaatcatgtaccattatacttatgtataataattgtcttccaagccagataaagctgcacgtaattcctaacgatactattcaagcattcaccccattgcctgtgtggggaacaaggatataggttaaggtaacttgttttagtgctcgagtattactatgtcgtaaaatcagaccagcctcaagagtagtaattctaaatatatagagaatttccagggagtgagaagtggtccccccacatatacatattgtagatctgtgaactcctgctacgaaagggatgcgttcgttcctccgcccagcttaccttttaagttatgatcatgtaggcgctaacaatggaactttccagttgacaactagtttgttttctttcttctgttatatcttttggaaacaatataggctatttcaccactggaccataacaaaaaccaaggtacatacttatttagggcttagtgggaccagatatgtcctacttcttgtttgaccatgcattttataaagagtttaggattctgagaatgagaccgactttgacaagacccatcactagtaaaaagatcaccccaaaaatttactaaagtcgagtcgtagaacagtagaaagctgaaatcaaccaccttccatcatgccacggaaaatgagggggtttctacagcgccacgtcaaagaataagagtgaaatgaccatcgcatgattcaattcgcagcttatcagtgatgtgctaccctcgaccgcttctgaaactttaaggaagcgtccctatctatgtaatcaggtcctagcgtcagcgtatataaactatgtatgtacaccataagtaccccgtacaataatatagtacttgtggacctaaggtagatagcgggctgagtcggcagtgacataggctataccatggcatccattaagcctaggtgattcatcaccacgcaattgtaggggtatcaaactggccgccatacgcgctctcagctcaacctatcgtcaataattgtgcctcataatggtgttaatacgaggtttatccaccaatctcattatgacacgccccgtggacacccgtggacacccgtggacccctagcatattgctatttcgagttgtttgatagtgatcagctgcggggtaaaacatgcaagtcgagccatttggaatgttttctacccagtgttattagaaatcctagcctcgttcgatctcgggaggctataaagtcacagttatagcccacttttaattgcttctcacacaaaaagtctcaagtttttactctacataagccaatactcagtcacgctcttatcaatcctctttacctcattactaaaggttattcattagaatgtacttatcacccccggggaatgacattccttgtggattggacttatggtttatctaggtgtaccactaccataaccactaaaacggtgaccaaagtcgatgggagtacaacgaacacaacaaccacgaaaatagcagattgtggagttgctacttgcaggacgtcggcgtcttacctaggttgagctgtatgtctatatctatgaagatcacgttcagcaaaaatgtcccaactaattcaacgaaagcatagatcgggctgttcgacatcggacgaggtgtaacttgatcgagcacgcacttgaatgaagttggtgtacaagcttgcgcactgacgccgggggatgtgatatataaatcatatgactcagctatctttacgctacataggctacatagttaggtggttcattcattgacgataatctaaccaaggtcactttctcaatcacttgtagttctaatctattctccataaagaatcttcgaagcagtcgccaatggtagtcgatgaatggaagcaagtccagatgtgacaggagtgacttacttttgttagtggtctacatacaagtgtaggtacctggtctggtgtcttgcttctataaagcggtggcattagccctaagaaatcagaaaagggggtcaccaaattcgtattattgcaccccgcatcctcaccgcctctatatcgatgtagtcaataatcaatttggatcttcctccccttctgttatcatctcctgtgcgcatacattaaatcatcatgagtttcgtggaccaagctagtcctaagaatgagatcaagtttgagcaaaaaccactgataaaatcactccaagacttgaatatagtcgagtcgtggaaagatggaaagctgaaatccactaccttctaccatgtcaccgaaaacgaggaggttttctttggctacacctcaaagaacaagcgtgagacgagcatcccagaattcaattcagctctgcagcgcgtccaggatcaagatatttatccaacaattcccgccgacacccacttgacacttgcaccggaaggattaagcgcttcgtcagtttacgtgaaacgaccaggcctacagtggtacgaggaaatgattggcacagattatctccccaaggctgttctcgacgagacaatggtgatggagcaaatctcacaatcgcctcacgaaaacataattcgatattacggctgtcgggtgagacgtggttacatcacgtcgattgtgctggagcggcttgaccaaaccctgagccagtatgtcacgacgtccgattttcaagagctcgacaaagtcaagtttttcgaatcgctcaagtcggccgtggagcacctgcacaccttggggctggctcataacgatatcaacccggataacattatggtgaagaatgggtcgccggtgttaattgactttgattcctgtcagccttttgggaaacggttgcagtctttaggtacggagggatggtatgaagaggtgttttatacttctgagaagaaacatgacatatattcccttgagaaattacaggaatggcttcaggctgctaagtgatgttagaaaaagtcatgtctcgatacaatatatagctattaggatatttcttattctctattgtattgtttgtacagaactaattgagaacatagtacggattatatatggaaatgtttgcagagaaaaagacatggtcaaagattctaactatgggaactgaagtaaattacataaatacgaatagttggtcacatttgctacctctatattaagacaaatataatctagttggctaaatcgtagttttttatatatttttatagatatcttctctccttgttgagtcttttgtcatctacctacgacaaaaaaaaaaggttggtatagataatgcaaacagagcaaacaagctagattattccactccacttctacttaactgaaggacacgaaacccttaaaataatcgccacttgttgactcacaggctacagcattggggcctaatctctgatatcgtgcttacaactaatcactacctcggaatcaatctcaaccaatactcctccaggcatagatcctaaaccacaagctagagagctgtcagctctcaaccatccaaccatgcacattctccccaagctggcaatcacagccttactcctcatctcaccagcaacatgcctctcaagctccaaaccaccaggcaaagacgccatccttctatcaaacgtgcaaaccctcacactccgcgcccaccgcatgaccaccgcacggcgcgtctcaccaatcccccaactcagctgcgcaggcccctcaaaacaaacgtgtaacctctaccaaccagaaacaatgcgctgcacaaaccaaggctacgactacgacgtcgaagacgtgcagtggacatgcaccgcagacatgccggcagagttcaagctcggcgcaacagatgtcatctgcgagggataccgcaatgccgatgataagtgggtgttgaaggggagctgtggggttgagtaccggctgctcttgaccgaggctggcgagaagaggtttgggaagagaaacatggattcggagtggggcgggagccagtccgggactggggttcagacgatcatggagatgctggggaacctgattttctttgggttcatcgctgctgttttcattctgatattcttgcctatcttggcgcagtgtttcgggtgggggaatcggcgaggcgggcgggcggggcagccaccggggtggggcgggttctggggaggtggtggtggtggtgnnnnnnnnnnnnnnnnnnnnnnnnnnnnnnnnntctggggaggtggtggtggtggtggacctggcggaaatgaccctccgcctccgtacagcagtttcgatccttataaatcttctgctcgtcagggctggacgccgggtttctggactggtgcgctaggcggtggtgcggctggttatcagatgggcagacgggcttacagtggatcgcgcggcaggtctgatggatatgaccccggtgaaggcagctcgcgctcgccgcagttctcatctaccactgctagtactgggttcgggtcgacgaggcgtaggtgaacatatggacatgccatttacgtatgtcttgcttcgctcgtctttgctaccaacttggggagaagagataccaaaagacagacagaatttaacgaagtcacaaatcaattagcgaatcaaacagcctttaaccccgggcttgatcaatgtgtatcctataatcccactcagaacgccgtaaccaataatctttcacttcataaattgtgcattataatccccgacttaagccgtgggaaagtcatcgattgatcccagaacctcctctgtaccgcctccctggttcttcacacccgccttcttgcgcgacttcttcacggtcgtgttgtcgttcttgacatccttggaatcgctagtcgggttgcgcagcatttcctcttgcatttccttctccttagcgtgctggtcctcaatccgcttcttttcatcgtcaagttcctgctggacaagcttgggatcatcgtaaacagtgttggtcatctctgagtaggttgcgatgtcgatagtctcagaaggtcccatcaaggtgtctttgattcgttgcggatcacggcgttcttcattgttaaactttaacttgatctgacgacgagagcgacccgggaacattttgctgataaccatgaaatcggtaccgaacatgcggagaccgcgataaaacagttctgtcatatcttcatcccacgcttccgtctttgtacgtttgccgtacgaggcctgattaatcttccgggtgaatgagctttccaccacatcttcgaggtcaccggcggctctggcagcatccgcatgacgatcgacctgcaaggacgtattatccagcacgatctcaccgttaacgattcgcattatagggccactttggggtttccagtcgactggctgttcggttttctcttgttcaggctcagtctgcttgacgggcgttcctgttcccggcccaggggttccgccctgcttcttccgttcttcttcggccttatcaatcttgcgtagctctgtctcgcgtttggacttctttccagttctaagatctttgcaaagttcggacattttcacaacattcggcaaaatttctactgtttctgcgccatccggggttggttcgcgcttcttgcgggtgcgctttggtttctcactaccctcaggatcagaggtaccggtctttgagtactttcgtttccttggcttggttggatcgggagtcgaaaggttggattcaccggccgttgcacttgaatcttcgatggtaggcacgattgactgagagcctcgacgacttgcccctacggatacggacttctttcgagctgggaccgcagtgactgtagttgataaagttcgagcgcgttttgctggtcgaccctcgactggggcaggttgttcagtttctggttgagattgcggcagagcttcatttgaatcgacaagggtttctgcggcccgcgctgtttcaatcctagcgtactctaaaagagcgttctctggtccatgatcctcagatacaggttgagcctcactagtcgggacatttgcgggaggtggggtcggctgggtggaaggaggggtaggtggagcagtcaagacaggcgcgggttgcgagatagagatagaggctttgcgtttctgtgggagaggaatcgcagctggcttaggaatttgagtcggccttgagattgtagtcggcttagggatcggagtcggctttgcgatgggtgtagcagtaggtgtgacagtctgtgtaacgatgggagcggtgatagcagcagtagtagtaatcgaaggagtgactgcagcgttcaaagcaatgggcgtttgttccgtgataggcgcagctaccgacgcaggtgaggatgctgtgactgcccgcggctcctgttctgcatccacagagggcgtcagatcagaggaagctacatctttagctttatcttcctgaacgggctcagctggtgacggttgggcaacactaggtcgtctcgcgggcgcggcggcgggcgcacggcggataggcgccttcggagcgaatttcttgccggttttatctatcaaacgcacggtcagagattgcatacttattcttctggtccatatatactcactgattgcagaactggagaaggacttcatggctgcccattgctataaggtgtggattgatgaagatcataaaaagttccaggccggggaagtgggcgaggatcacgtgatggcactagcggacgctaaacctcgttgaaaatcctcctgtcttcaactcctcgatctctgccatcccaccccttctattgtctgcccgcccgctctcccttcacttccacttctttcgatttctttcgctatttattttatcttctaccggactctccttcgacaggattgacacagtctcgagatctgcgtctggctgactgacggacggtccggtggtgataatagccctcccatgctagtctagccactgatgccggccgtcgaaccccccgtcaagtcttcagagtccggtcttatcaaaatggaagaccggaagaggcccgctgcggaccataatgactcagccccgccgttaaagaaacaggctaccaccgttaacggtggtagtaagcctcatcctgatgccgacatgccatggaaagatgatttggaagtatgttttggttcttccgcgatctggagattggcttttggtctcctattgggtatatgctaattgggcattttgcgatagcgatttcaaaaagaagcgattttgcgccagatgcaagagtacaagcgggagaaatcctcactggaatcacgcttgagccagatgtcaaaggctgctacgtttcataatgatcatcttcgtgttatcgatttgtggttcaaacaggtagctttccccattgtttgtgccggtcacttggcatgaatttgggagcaggaactaacgctagtatagctgattgatgaagtgaaattgctacttgggccaccgcaagcagaagaccaaggtcagtccccttgttctagccccacaccccacccactattccaatattgacaatattcgcagaaaccccttttaaaagctccttgcagtttgaagacgttgaagagtttgagacgcatttgaaatcgcggtcggaggatattcacgcaataatttctcaagttcagtccaagtctaatgatgcgcctatcgaaatttcagaggtacagactcgccttgcaaagaagttggccgaggagaaagtgacgatcgccgaactcgaaaaaaccttggccgagaagcaacagttggaggaaagccttgaggaagcctccctgcgatatttggtagctgaaaagaaactggatcgtgcgaagagtctgactgttgcaaaattggaaaagcagcagtctatgggtattcaacgacctggggaaacgtcacaatcaaagcgcgaaggatcgaccccgaccaatggaacccccgccggagaccgcaaccccgaattggaagaagccaataacaagctcactgcaatttcggagacacagaaggagcaagtccggaaactcgaagccgaaaatgccagtttactaggccaaatcaccgaaatcaaagtcaaggttggattcacctcgttacgttgtcattttgtcgctcacatcgggatcctagtcttcaaagttcaccgatgacgattacgcccatacggatttgtttaaacaccttcgatcacagtacgacgatgtagttaagcgaatcaaccatctggaagcgacaaatgttcaacttcgtgaggaagcagagaaataccgctcggaaagaatcgcatacaagatccaggttgaagatgaaacacaaagtacgattgccgagaaggaagctcagctgatgagggctgaaacggacctggctcggatacggaatgcccgcgacgaacttttagccgaccaacagatgcgaaaggccgcgcaagatcagaagaagacttctagtctgaaactgcaagaactagcagacgctagagaggctcgaattacagctttagagtcagagagtcaaaggttgcggctgcagattgagggctccaagtccgacgacaatatcaacgatatgccgctagaggagcttcgcgccaagtacaccagcctagaacgccagtactccatgctcaacaccgagttgacatcgatgcagacggcctacacgaagtttgctactctcgcatcgcagaaagttaccgactttgcggctatggaagagagggttgcaaggctgacggcggagaagtctaaagcagatcagaagttctttgctgcaatgaaaagcaaagaagcacgggatgtcgaagtgcgaacgcttagaatgcaaagctccaaaacgtcggatattgtggcccagctgaaggagtccgaagcagctactcggtcattagtgtccaacatggacaagcaagccaatgagaccaaggaggcactaaattcagccctgagcaagcaccgcgcccttcagcaacagttgaccgagagcaatattctcatggaaggcttgaaacatcaggtttctgagctcaaagggctttcaacatccaaggactcgacactggcaagcaccacttctgctttgcggcaagctgagacagaggtcgctggtttgaaacagtccctttcagataccaagaagagtctggacaactggaagaccaagagtcttggcaattcatcctcggaatatgaaatgctgcgggtatgttgaattttcacatttgttaatgaatcagagctaactacgttcagacacttgcactgtgtacggtgtgtcgtcgcaatttcaaaaatacggtgatcaagacatgtggccatgttttctgcaaagattgcgtcgcagagcgtctcacgtcgcgctcccgcaagtgcccgaactgcggcaaatctttcggaagcaacgaccacatgcacattaccctctgatcgaccttcgaatcccttgtattatattttcctttcgatgcttttcctctttacgtcttatctctttttagtatgtcacatccggacaggttcatggtgtggtgtttttttgtgtgtgtgtctgtggtttagcaggtctggtttgggtcggcgtttgacgagttatgcaccctcaaccctaactcggggcttgttttagttccttttcctctttttcccattacaaaccaaagcaatggtgggtttctcaaggcgcaggggcgtcgttcttcatcctctctggacgagaggccggcgcacactgattttctcagaggctgagctattctagatttctgtgtcatgtaggactaccgtgtacggagcagaaaaagtacaaacttgacgaatgcaatgtgagattttccataccccaatgacttgattgtcttctattataaagattcttgatattctcattctcatgagttaaagatccgactatacaacaactcatgcctcccaacccaaagatccagcgcagggacaacctgcccagcctgctcaacaggcgtattccattcccgcgcaatgcgcttcatcatcgtatcctgcaacccctgactagccaacacattctgcgcctggtaagggcccataacacccgctctgacagccgcactcaggaccgccttagcatgattcataacaaagacatacgccgtctgctgcaagtcgagacccatagcccgacagaccacaccccagagcggagcaaagtggcccttgggcccgagatcctcgtcctcctcgagacaagacttcaacgcatcggacaaatcatcgatagcagtggcggcgaccgcggtatctcccgaagccgggttctcaggcctcgcgaagctgactctaaatgcgcgctcccaaacaccgatgagggcgcggccttgggcgatacttgcacgctgcgcgacaatgcacggcgttgatgcgtccaggtcgttatctagtgtgtcgagggttgaaggttgccggtatccggctagcacgtaggggagggatgtgcttgcgattgaggcgatggagagtttgaggaagcggtggaaagaggttattggggcggtgcgagcaggtttgttatgagctagataggactctagtccgctagagtaggcgaaggagcctagtgggagggcggagtctgagaggaggaggagggcgtgaagagatgcgctggaggtggtaggtttattattggtattatattgttctaggaggggttagcttaggtatgcgacattggaggtttggatttgcctacctttaggggcccatgaggagggtgggctggggtattcggaggctgctagttgagcacgggcatcttgcaggcgcgactccaagagaatgacctcggcttcgaggtcttgggtgtcttggatcagcatagtgtagctatcaaatatgtggtagagtatcgtatatgtagtatgtacaaagtacagatttaaaaagtaatgttatctggatcggagggtgtcgaggtcttatagaagctgatcggcaaaacgaaaagcggaggccgccgcacttctccgtatcagcttgactgtttcacattattaactgtttttggacttggacattaattactatctcgctgatctcttttgccctgttttccccgcgtcatgaactaaagtcaatctccacaaccatgtcaggcaagcgtctgctcgacgccatccaattcctcaatgtgtcgaaaaccatcgcagccaaacacctggccatccgacaacatcagctagatgtctacacacgcacatcctccttgaccaagggtatcaaggcccaagcagagggtctgatcctaactgctcaagccgccgccgcattggcacgccgatttgacgagccatctccgccgagcccggcaaacgtccccgacaagcctcccgccagcactgcaacaccacctccggacctcgcccgcaaattgcaacgtcaagccgaatcgcaaatcccgtcttcggtggcaacatacagcatctatgagcaaccaagcgctctggttgcgagcaagcagcaggatgtcttctatgagccatcgcttcggtcggagccggatctctcgggcctaccgagagtgaaagtacccaaggccgcaagcgatgctcaagttggtagcgatggattgaacgcggatgtcttccactcgcctattgaatctagtaagcctgctccggttgagcatgagatgcccgaggagatggtccaaggtcttttccatagcccgaaagtgtcgcgcatgatctccggacagccgccgccgaagagggactggaagctggccgcgaagcctcagcagccggtcgtggatgctgctaagcctgtatccccggtgactccgaaatccgaggctcaggagatggaggagcttgcagctagcgtcgccgaagacgtggtgcctagtactaataccgtcggcgagaccaaggagccaaaagcgtaccagatgctggagtcgcgcgtgccgtcctctcgactaggcagactctggcagtacggtggtctagcgacctcaatggcatttggcgctgtcggagagggtttgcggcgagccactggcagtcaggacaatggatctattatgttcagtgctggtaacatggagcgaatggtagccaagctgtcaaaaatgcgtggcgcagctctcaagctgggacagatgctgagtattcaaggtacgttgcattgtctagctcactggtatcaataatgctcatgcaattgctagactccaacatgctccccgaaccaattcagcaagtcctccaacgcgtgcaagatcgcgcagactacatgcccgcctcgcagcgtgacaaggtacttaccgacaacctcggacccaactggcgcgaccttttcagcactttcaacgaaatccctatggcagctgcctcaatcggccaagtgcactcagccgttctcaaaagcaccggccaaccagttgccgtaaaagttcaatacccaggcgtcgccgactcaatcgacagtgacctgagcaacctctcaattcttctaacagcctcccgtctcctccctaagggactgtaccttgacaaaacaatcgcaaacgcgcgcaccgagctagcttgggaatgcgactacgtccgtgaagccaaagccgccgagcacttccgcgggctcttagccggcgactcagtcttcatcgttcccgagataatcgcccacgcctccggcaaacaagtcctaacaatggaaatgctggatggcgtagccgtgaccaaagtaactgacttcacccaagcccaacgcgactggatcggcacacaaataatgcgcctctgcctccgcgagatcaccgaattccactacatgcaaaccgacccgaactggacaaacttcctctacaactcgtcgacgaacaaacttgaactcctcgacttcggcgcctcgcgcgcctaccccgaggaattcataacaacctacgtgcgcacgctagtcgccgcctcccgcaacgatcgccgatcctgcaaagacctctctatcgagctggggtacctgacaggaatggaatcgcaggcgatggtcgacgcgcacgtgagctcgatcataacgatcgcggagccgttcatgctttcctcgccggatctgtacgatttcagtaaccagacgatcacggaccgcgtgcgcacacttattccggttatgattcgggagaggctggcgccgccgcctgaggaaacgtactctctgcatcgtaaactgagtggggctttcttgctttgtgctagacttggtagctccgtgccctgtaaggctttgtttagtgaagctgttgaggcggcgcagcggaatgggctaaaggtggagtagagagatgtggttatgtactattatagactctgtataactgtatactatatagtcagggaatgaatcctggattattttggttatgtcaagtatcaaaaggatccaggttgtctcgtaaagttaagtttgccctaataagtgccaagagcgcctcccgcacgcggctcaacaagacatgatggatttaatctatctccacaccatacaagatctaagctacgattaaagactcgggcaataatatccttcggtgaaaaagatttgatgaaactagcatactctattctttcggtaccaaaacaaaggaacgatatcatccttaactagaagcattgaagttatccaggaccgcgtcgtccttgatagtttcccaaataccgtcaattcgtctcacaactccctcttcaagaggacccttccgcagaatagccagggtgttcttcagttgagacacactactagcacccaccacaacagcatcgccgagcgcactttggatttgagagtggaaagcgacccagcggtaggccaactcagccttcgaaactcccgagtccttggacagttgatcccagagatcaagcgcctccaacaagctgggggtattgtacagcctattgtacaattgacctataggggtgctggaatcccagcgaccttgtccgccgttgagaagtgcctccttcgacttcgtgaggaaaccgcccgcaatagggctatatgcgtagaaccgaatattgtggcggcgcaggacggggaacagttcggtctcgatcaggcgcgagatggcattataattcccttggtagaccgaaggaaggacgtaacccttttccttgcagatgcggataacctcctcgacttcgtcagcgcggaagttcgacagcccaaagtagtggaacttgtgtgcttggtagagctcattgatagcggcaagggtctcttctagaggaactttgcgatcaggcgcgtggaggtaaaagatgttgacctaagaccattatcgtcagcatcggttccctacagtttgcggattgggatttcctgcacatacactgttcgtgttcagcttccggaggctctcgttggctctttcgatcaccagttctttggaagacgttccaggcacgaagccaccagcgtgcttggtatcgacgataaagcgggaagcggcacctgtttggcctaagagctcttcacttcctctatatatctgggcagtatcgatgtccttcacaccattctcctcaaggacacggaggacttcttccacctgcgccggggtggaaaagtcactagaagcgccgagaagggcgcccccatataccacctttacttgtttgtcggccattgaatagatatgaacgaaaaagggattgcaggacttcaaagtttaatgtgaaagtaatgttgagaaagtgtgataaagacaggctcagatatctatatataccaacacatgcgagataaatcacattagtaatacaatcacaagtgctctaaactcggagactttctatactgctcggtaagcagagttgtcattgaaccgaagccgaaggccgaagtgattcagatctctttgtagcacgtatacaagccctcgttccaccctgaatgcccgtccgcaaatcagaaccgaatattgaagggtgtggatccctttaacgcggccagacggacgggacacggaaagtcgtagggaaaacgggataagcggactttgacggagcgcagccacattttgtccgaacaccccaactcctacccaaaattacatacctccatatgtgagagcccgaaacttcggccgaatattctgtttttcaaggcgcatccactaaagcggccccgtgcatgagaccaactccgttctgatgaaggtactgactacgaaaggaggaagtgatcaaccgtgagtgagaatgatggtagatgacggaagatggggatctaggtactgtcatgaagctctcgatatagcttcgcgctataaatccgccagaagccagaagaaacatctctcagacatacaaaagaagtgccaacgcagcaagctgaacggcaagctgcctgtcggagaagtcaaagaaaagggaaggaatgccacagaaggtctaccaactgtatagggcaacagcgagcacgtcagaatgcatcacgttctgagctcacgggacagacggactctaacggacatgactcggactctctccgacaacgcaattcttgtcataaaccacatctaaaattactcaaactaggtgggtcggagatgaccggaaacgagggcattgtcatgagcatttcattataaataaagacaccatgctaccccaatcgtgcttcagattaatcctcatccttgcaagtcataagttatggttaccaacacccacaaagtatttagaagggatggagcgaccattcgttcccacatcgaaccacgtccgcttcatggcccatcagaagtccttgtcaaagtccgcgcggtctctcttaattggaaggatgtggcagtactcgacggtcgatttccctttccagcattggaaaatggcatctctggaactgagtttgccggggaggtcgtatccgttggcaacaaggtgaaatccttcacggtaagttcagtctagggtcggtttgtcaagtccgtggcttctctgactcgtttttattctttaggagggtgaccgagtaacatctttgattgacttggatgctattaccggaagagaaaaaaccgtgcaaggtttgtttgtatctaagcccggtatatatggtataaagtcctaacaagcacaggtctgggccagaatatcgatggaacattagcggagtacctcgttatgccggcggaaagccttgtgaaaattccagatcatctgacgtggcccgaggtaaacattataccagaaaggaagactgtgatttcttggagcagagctgacgaaagaaaataggcgagtatgatcgcgtgcgcaggattgactgcatggtcagctctcaatatgaagagctcgaacctgtgtgggaaaaccgtgcttattgagggtatgaatcagaaaaatcacgccaaccaaaggcacaatggctaaccttacttatgcaggaactggtggtgttagcctcatcgccctcattctcgccgttcgggctggtgcttatgtgattatcacgtcttcatctgacgacaagcttgagaaagcacgaatcctgggagcttcgcataccattaattatgccaagcatcgtgactgggagaatgaagtgctcgaacataccggagggctaggtgtagacatcgttgtcgagcagggaggagcggctactctattgaagagtgtctcgacggttaaaaagggtggccaggtgtcccaagttgggctgcttactgcaaatagtgaaggcgatttcgttttgctagtccagcaattgatcatcaaagcttgcaggatcgtgtgagtagtaatccctgtgttcattatatccaatactaaccgagtcagaggtatccaagttgggacgaaggttgacttggaagactttgtcgagcttttgagagtcactcgccttggactgttgccggttatcgatcgaattttcgaatttgaacaagccccggaggcttgtgcatacctgcaaagtggtaaagcttttggcaaagtagttgttcaattctaattgcataacgttctccactctaccagatatatgaaactacacaagaaccgtcgcgacgattgtaaggttccctgtagatagatattctcagataaataaataggtgttattgagactcttatgagaaaaacacaaaatgcctagatttctgtcacctaggttgggatagagtccatgattcgtcgtgccgctagaagttccaaatatatccctggagagacgttagctgaatatcaaaagcaaacgacgtaccgacaagtaagaacataccagcagatttccatttcgcgttgagtttttccaatgctgtttctatgacacccaagcccctcaattgacttgtaacaatgaatcttacccctgccaaataaaaccaatgcaatacaaatggcgggatatcaccgtgggttagatccacgctctccgtctccatatattcttcagctacggctagtgcgaaggaggcagcatcattagaaacagcgtttgcacgttcacgaagattcggttcctcatgagaaagatatggggcataaagcgttaggagggcgcttttgacaacggttagtcagaatgtataaaatgaattgtaaaaaggaaacagagggccgtcaaaaatgagtaagtgggcatgagagatacctaccaaaatgagattgcagtttggtagcatataatggaataagtcgtgcccgcattagactctgaatacgagattaacgcgtgaagggtcttctccagctggctaacctcttcctttcgaagttcaatgtcaatcgacatataaaggtcatggagaaggacgcggccaaggagatagccagcttgcacgacgtttgcgtagcgtccgagtgactcgggaggagccgacaatgtggagaacacatttttgtatcctccgtagtcccattccttctcctggcaaggaagctgttctgttaaagcgggctcggaaacaagcaactcctgtcgggggtttcctaggttcgcaattctgggcgagcacaaattaatcaaactgtacatatggggcccgtgccagattaaacaaaccgctcaagcatgaagatagcccaccaggttcttctcctctcttccgcttcaacccatggtgtatcactaataggaccatctaccgagctagtccaaccgatacctaatgcaagagaatatttcaggcagagacctattgatacctgcacggcaggatacatagcgtggccaatctcataaaccgcgaggagaatacaaccctgtagtgtctccatggaaagaataccggcaacttgcatctcagtaaacagccgccttatagtagagtacaatggggtccacgggttgtcgttttgaagagggctgaaaagatccatacatagacacaagaaaacagcatcagtccgcaggggcgacagcggattcagcaattgatcgtaaaccttccgttttgatatgattggcagccatggatgaacacactggtaatagcgagttgctattcgttgtaggccagtattatcacccataaatggtctcacgtaactcgggattaaattggggacagggagaattgataaccgtgctttacttcgttggaagacttcatggtctaagaaacgacaggccacactggtccgatctcgaggactctgcccgggctgcagcgcaggtggctcctcaacggtaattgcggtggaggaagtggtattctgatcacttattagatcaagtgtgttgtttttgtacgagcagaccctctggtgtctgggaacattagcccgaattttgattggcagtgttctgatgcttaccgtttgcaggcggaacactcgggcgtttccctattgcatttgatcttgcgtttatgacagaagtagcatgcccgctgggcacggatggggtcattggtagcctggtctgacatagtttcgagagtgtcaggcacaacttttaatgtttctcatcatagaacgggggaaggacggaaaggcgggggacacggagaagttgccacccctcacggagaatttccgagatattccgccgggcccgccacagcgagactactctagcaagttcgagcttacgatttgtcagggattcctcatcgatcatgatacacattcgaaaattgttctaatttggctcttgccttgggcttccgcccatatttcagaataggtgcgaattgatgtagttatcgtatttcaccagaccataaggaagaccaagtctctggtctatacgaccttcttaaagtgtagtaacggaagtaaaaagtcatgttttttgcgtaaactatggatccgctagctgccaaagccttgtaggcgacctcgccgagaggatcagactcttgacttaacgatgatgtcggagtatggctaggcgcctctctgccgaattggttgtatcggcgtcgacgggcgttctgagtatcgtctatgcgatctcaccggtaaggggagaattaccctagtcccggcgttgtgacgtgccgggtcttgtcacttgtaagacagaagattgcaaaacaatgcaaactagaaaacaagcaaataggcaaagcaaggcaaatgttggatcgtaataggcgcgatgggttgcgggggcagactgccatcgtcccatgatatgctgactctgccggcgtgcatagtctgcggcgcgcatagcgaacatctagtgatctttcggtctgatatctgctgataacctttttcttcaaggcagagttgcatgatatcttcatatatgaacgaataacggcctggcaaggcactcatctcgaaggcattcattttgagagttgtttgcggtatcgaattgcctttgtagacaatcaaaacgaagaagaacataaggagagaaagagaagagaagagcagagaagaggggctgtttacacagtccctaggtttggccagttttgtgcacgtcccatactccactggatcctcatacactgaagcatatgcaccttggaagggaccccagtctcgtcctataatatatgggctgcggtatcagctcgtccggggaatatcgattgcttcgtcgggctcgatgtcctcggggctgaagatcgttgaccgggttgatttcttttcttgctcgaccttttctttctaggagtgacccgaagagggagagggggttcgagactagagagcggtggtgttacagaaggtaagtggaagagaaggggatcatattgtgtatttacatacatggtcacagatattccagatcagtgaagggagtatcacctgaaggaacaaacagcatgatgagcgggccacgcaccgttcgaggatattgccagataaattgtgcgagtgcgtttgtaaggtggtttttgtttcctgctgtaggttgatttcgtgggacatgagacagtctcttggttaacggcccacatcacctggctccgccattgtttctgatgacaagaaagaaatcgaaggtaagaaaatctttttcgttgcgtatagatattcgttaaatcggctgacacgctcaccgtccgcgaggatgcgactgcggtagcgaaaggcacggcaccagatatcttgcaagatataatggttggtatcaacagccaccgcaggaatatatgaaacatgacgactagatagccatgataatggtatcggacaacccctttcgtttgactgcgagctatgctcgtcttgaggacgcaattggtgataggattgagctcccaaccccatatataggtgtggatgttgcgtatatatgactcatctgttgcatgattctgcgtataccaagattagttaatacttttgaatgagacgatcgatagtatataactcactggtgccatttgaacgaccaggatagagagaatatctctggttgtattatcattattcattgcgtgtcgaggagacgactgtggtaagggattctctagagagagatggaaggattcgctctgcgtgaagtatatttgtagtctcacaagagcggtcggccactcatgcttttccatatataacatgttatgagtgtgtggtcactcattaagaagtatgcccctgatatatatgaaggcaaggttgtagagcgagggtaaagcgaaggtaaagcgaagaaggtaggtgaaggcaatataaaggtggtgtaaagggaatgtgaggacaaagggcaacatgaaagaaatggattgtgaattcaagattcgtggttagcgctaggccgcgcggttgctgttcttttgggttatatatgttttacacaactgcagtctgtctctccaccttacttctcttccttcctccccacctcaccaccagcatcgaggcaaaatgaagctcgcctatccaccgtgggtgagaatatcgacgatatccactcagtcacctggcattacgcaaagtatcatgcgaggctcctcctgagcctcgcatttaagctcctgcccagcgtgtcattcaagctcctgttgttcgccgcgatgcgttcagtggtggttagaatttctgagattgcagcaccctggctatgccaacctcatgattgactgtgagcggatatctcagctgtccatagaccaggatatgtcggatctaatccctccacatgatcaaccgactgatcctgaggagccgatagtaggtgagccagaagatctcccgacccatacggacctggaaggcgagtacgtggctgtaacgaatcttgaaccccacttcgacgaggagacggtacttcgaaatatggtactaggcgccattcccccgcctgagcattctccagttccatcaacgccacgccggcacattatcctaccttctatccgggtcactcccatttctgccgacatgaaccctcggtttcgaatgaaagactgtgtgcaagttatatgtatatctggtccgatttcgaacaacaggcactagaagcttgtaacaattgactttcaccagtcacgtcagcgttacagattcacccgagggtgatttatactttgtcggtagtactggtcgcgaactgtggctagctggctctacgtgcaagtcgatgatacacttcaaaaaagcatccagaacatggcatacctcccagagtttgctgacaccatgttcgacgagatcatgttgatggtgcaaggaagcgacaaagctgagaacgcactcaacgagaccctgaagttcgacaaaatgcgtcgttcagatttcaacacagcgagggacttcatcacagagtaccaaaaacagtaccacgtcctcgcgcgcttcaagatacaacctcaccccttccatacgacaatagccaagccatcctatcgctcacgttcctgacccttttcccatatggtagggcggagattcaatcgtcgagaatccgtactgtcgaattcaaagagtgggcgcagcacctgatgcgccatgagtcgggccgtttcgctcggcaccctcgctttcgttttgtgatctttaatatgattgctccccatttcagtcaattcgacgaatatctatgcgcaacgaaaaatgtttttcttaccttcgatttctttcttgtcatagacaggggaacatgacacttctttcaataatctggagtatctcttaccatgtatgtagctacacaagaagggtgtggctgaacttgccatacataggcctacgcttgctgaactcgagcctggagagattccaacccaattttcaccctcttccaccaaagccccacagccagacatggccagaatcatcgcgtccgatcatcaaacccctcacctgagactggcctagaagaagcggatgtactgatgagtatatgtcagagcgccccccggtctctccaaaagcccctcgagaggaggcagaggccctggcctctgatgaatccacaaggttgtttgtgacggatgaaacgacgcaacatagtaccttagtaagttctatatcttcgaatcaacaaagtattcacaggtggtcgcttatacaaattacagtccaagggaatgtctcggggatgtgcctccctggtcatccgactagccataacttccatgctaccgaagagaacaaatagccaatttcaaccagtcccttgacgctcatacatgcagttactggaaggccgtgaatcggtacgattgtgacatggagaaggcccctcaagaagaactttcaaatgttggagattgtaatgacacaacagaagagatcgccaaagtaatcagcagagatctggtgctttgaaaaagttcactggctaatcatttatgcagaatagaacatagctcagtcaaagcatactacagactactggcggtggtgatggaggttcaatcaccactaaaaattcccattctgagatcaaaagacgtgaaaatacccagcaaaagaggcacaactataaaagatgatatcgagaagcaggaaaagtacatcggcggcgccagaaaccttaaggcacagttccatgacggggagttctccccagatgatgcctcgagatctctcagaactcatattaatgaagcctgcgagtagcccacctggaagaggtctcaaattgccaacagtagtcgtggattctgcgtggtctgggtcattgaccaattgacggaagattccctattctggctgaatgaatcagaccaggaggtcaaaatcgcattaacaacatcacgaatatcatattcggacgggtgttcttaaagacggggtccaaatttacgataatcaggaggccataaggccattctaggagagacttacggcagataagaaactccacgtcgaagagattccaggtcggtgttcactttgacgatgcacagagctaggtaatttggatattggcttacagctggctgatgcacctggtcgcacttaccattgcaagtaaacccagggaaagaagactgggagcaccaatgtgaaatcttcttccttttgatctccgtcaggatctacttataattttcgacaccatgtttcaaattctataatccttcgcactcggaaaagttcgatctcgattgtggcggaagaaggtgcaaggttgtgttcttggcttagtttagggatcgatcctcttccatttgctagctattacattcactagtggattggtcactcagattggccacccagattggccaaatctcaatatttgtctgctggatcagcatcgggttgaggagaaagggttatagaggaccctggacaatgtcgttactctcgatgactttggggacaacaacctagcagaagagaaggccaacagtgtccagcgaatgatcggcactctgggtgtatacatattgtttcgttacagaaatacaatctaattcaaggtcccattgacggtcatgagttgcaggagctcaatagagcttcatatagtagatatacgtgatgtgcaccgtatcgcgtaacacggtgatactctactctcgacggaaaaggcccgggaagtcgcccgttcgatgaatgaagagcaaatcgaactagacaaggtcaagacgtctcagcgcaggacccgaatgaattagatacggacgtatgatatcgttccagagattttattaaattcacaggctaggtatacgctggcatcacacagttgggttggacatgcagatatttgtcgattcaaccttggaagaatgatggtgataagaactatagtggcactaagtgcagtggaattgctggatttagtctgtatattacgtccgctcacttgtgaaaactaaacaatatttcatggtgaaactatctgcttatatcaacttcgtttaaacaatgccaacaacatcgagcgaagagagccaaggcagaacggtctctagcatatctgacatgtgatagcatccagatgtcgaggtcctccttctctttgagaagtggctccattttgtatagtacgaagcttcccaccgtaggcagtccctcgcagtggtctcctgatggagcttgcatacacagctattcttggatatagtcgaagagccgaatatcgaaacggcaaacggctcagatgggaagaagaaggatgggactcacaacctccattcccaccagcagcgacgggctcgtagcggaacctagccttgttagttactcgataccttcaaagtaagatattgggcaaagttgaattgcataaaacttaccacttggcccgaacgttgtcgttttaggatgcagagaagaagggacagcagagtgagacatgaagtgcggaatgagatgagagagaggtgaactcgaaagtcgagtcaatcaggttctgggctgtggaccagaccaactcagaagtcatcacaaaaggcccaagattccccacaatgtctccgagtgacgagcatgatgctcatcgacaaaacccctcaattcatgaatgttatcactccttcatagagactttaaatcgcgataagacaatagacagtggagggaaggttgatggggtggaagtgtgaattgcacgaggagcttctgttgactgtaataatgtttgtgtatctccctgcgatgttcggtgttctaactggagagattcgcaaactccctctgccactgcacaagggtctcagatcacggcttgctgttgtgcgctctcctcggacataacatggtatattgagagttcgcgctatctcccggaagacgccaaaccgaatatcaaatctgtgcgacgatgtgggagctatcgtgggagatttcagaaagaccggtctagttctcagtagttagtggccatattataattgatacctcaaaataggcatcagagcctgactggtcccacttactcttctgcaggtaggtttttatcatttaagcacgatctgggcccccctcctgcatggatacccatctgtcatggctgtgagatgggcgccatgaaacttagcattgagttgtaatcaacttcccatccattcagctcggtcgattgggggtggcggtgattgtagtattcatccatgcaattcgtcggcatgcgactgcattaccaactgaatgcatgaccggcgaaccaattctggtagctagagagatgtagatgacgcacgaggtcattccaatggaggtcggcagctaagaggactatgattgctggcctgcgttgttcttgacatacgccatgaggtcgtggcggaagactcaggacaatcgagtccagcggagatttagtgggtagttctgcgcactctccagaatcctcttcggcttttcctgattgtcacttgcccttgatgtcttcaaaatctgagggtcgcatcattcatcatgtcatttccataattccaagtccataatcccaaccagagctcatgtcgtgcctggttgagcctagctcatggatggttgtaagagaagacacacaaccatcaatgaccaggtatgtctctataatccagacgcacgtagtcccaaactcagaggaccagtcgtttttgtatgttatatccgaattcgacattgtgcaggtaatttccctttcttgccacaaatgacaagagtccaacatgaagtccgcctattggagtttctgcgtctggaggtcggaagcttgaggcgtagagcgctgtatcaatgcctttcggactgatgccgaggcggagcaggtctgtgggtccgcttgctagttatacatgggaatgtacttgaatttggcgcatcgatgatgtaggcgaatagtatatgcctttgaatgatgccgagaggggcagatgtgtggatctgtctttctttgcttgggatcttgtccgcccagcaaggtccagttcagtcggtggccatggtgcgaggcgttccgtgcggtctgcgttttctttttacggtatatttatgccatttccgagctaacgatcagcttttgcacgatgttggcttcggcaagtccgcggtagatctcgccagcttagctcagcctacctgttattgtcgcccctccagtccgtgcctcttgcactggacgacaagagtttcttggctcgcatttgtccggcctggtactggtacgtatgtagatctgagtagccacgctgtccagattggttgctaagtcggtctatggaaaaggaagacaaagcgaaaggataatcctgaggccgaaggtcggtatatagtcgaaaggccaaggagaaggacacggatgcgatcaacgtgcaagctgaggttgttgttgcgccaaacttcgttctgacctcatagggagaggtgggggcagaggcaggctgcctatatatcttgatctctcaacaatatataattatgaagtctgtgatgatgcctgttagtcaaatatcattgacttgactcttatttctgactcacctcaccacagcagtatcgcggactattcgtcgtcagccagcgtcgaggacaaccagagaccgtctgccaggttcatatataaatcactataaacaagccatggctaaaacgtgagagggcttgctacagggagcttgaaggaagactgcctgatgaatcagtgaaaggaaatcagtgaaaggaatcatataggtgtgagaagaggatggttgtagaagagaggagcaaatagctatctggctatttatatctgggccagtaagcaaacaatgttagactcattactcattgtggtattgtaatgcagacaacaaggaaatgttgaatagctataagagcctctctactagatgctacgtgataatctagaattacacaggcaaagagtatgaactcaagaaatcagagaactgtctctgtcctttcattactagaactaactagcagcgacttagccggccggattgtcatagtaacacaatccaagctagctttgtcgatcatcattccacgtcgcaacgtattcgtaactgtgattcaaaatcaacacgtaagaccgtaggtcaagatatttggaaaatcccaaagaatttcaggcagaggaaagaagagagtggacgtgaggcgtacggggtcttcaagcccagcacgtccatcggggtattgggggatgaaattttataggagatggggagggtagatcggggcgacacgcttatttgaagacgtgaccatcggcccactccttaacttggccgtcaacagtgacgggaacgtcctgggaccacatgtcctcaacgagcttgcggtcagcctcgttggaggggtcgagcttggtgaactcgtaaccctcgtagtcggggccgacagtgaaagcgggctcccactcctggccgcgggtcatgtaggcaccgtagacgacacagttgtagttctcgccgtaaacggactgagcaccgaagaggtacttgcgggaagcctcgagacgagtctggaagccaccgatcaagttgttggccatgaaggtgagcttgagctcgttgttgtaacggtagttgaccttccagagagagtactcatcggcgttgaagtgctcccagaaccagggcatggcaacggtgcgggggtcctcgttggagaacttgcgcttccagtcatcgaggataagagtgggcttgccaagagcctcaagggggtgcttagccttaggctcagcggtagaggcctcgacgggggcggcagcggcgggggcagcggccttgggcttgggctccttcttgggggcgacgtacttgacgacctcctcagcgaacttggggctggggacgacggccttgaaggcgtcctggttgataatagtgttgtaccaccgggtggtggcggggttggcctcgcgccaggtcttgtccaagacagtggcgaaagcacgggtaaggagggaggcagcgaagatatcggccagagtgatacgctcaccaacaaggtaggtgttggcagtgaggtgagtctcgaaggcggagatggccttcagggcaaccttggaggcctcatcgacagtcttcttgttgtaaccatccagacccaacaaaggacggtaccaggcaccgaacttggggagaacctcggagttgacgaaggacaaccagcggaggatggaagcgtaatcctgcttggtcttgccgagaagggtggtcttctcgttctgggaggtaactatgaacaggacgtgttagtcaagttgtttgaaactcgatggatccaacaatggagcaatcggaggtgacaatggcaccatatgtccatttcaaaaagagagtggggtggtcgagtccaaattttcccgcagagcggggtagccaatatttttttcagagttgttttttctcaacagttgttataacaatagttataattcagacagggataactaatggtgtctcatcataaagaagagaggcataaaaatggaccgaggggtgtgtggtgacgcataaaagggaggatattttcacataccatagacggcaatggcaatagcctcagacagagtgaagccattggcaccctcgaaggcggggatcttgccagtggggttgatcttgaggtactcagcgctggtgttgaattcagcggtagagttggcctgggtgttaaccagctccaagtcgaggtcgttgtgcttagcagcgaccaggatggagatggtgcgaccgttgtcctagaaaatattagacattgcatcaaaataacaaagacgaagataaacatacaggcagaccgtagagctttccgaatgccatattgaatgtaatttgtggaatatgaagggaaaagaaagaaggaagagaaaggagaggggcgagtaagaattttgtgctggcgggacgacttcggtgctcggaggaactgatattgccggggtcacgtcacatgacccgacaaaaaacatgacaactcggagactatcaacggcctccatccaggacctcaaatccgcgttgcagccccgaattccccgccaattccaccagccatggcgtggcacaaacccaccagcctcgcacaggcgatgcaatcactccgcctaacctcaaccctcacaaaaccctcaatccaagcctcccgaacaaccctcaacaccctccgcacacgcacctacgcaacagaagccgaatccgctccggcggccgcagccccagaaatcaacttccgctccttcacccaacagcccgcccgcatcatcccctcctccccatcctacttctccggcagcccgcggttcatcgaccacgtcctgcagctggaagctctgcaagcgaagtacgccgcactccctacagtgcccaccagcgaggcaccccgcatggcgtggttcaagctggcgcagttccgcgactacgtgggcgagcccgtgcccatgaagaaatacaagtctctcgtcaagatcctgcagcggctgaaccgcatcgagcccgaggtgctgcctaccgaggtgcgcgataccctggctgcgttcttgcgtcccggtaacccgtatgcggtagagactgtcccgcgcacggtggatgagaacgggcgcgctcgcggcaagggaaagagaaaggagtctacggctgttgtgcagcttgttgagggtgagggtgaggtgctggttaacgggaagagcttggtggaggcgttcaagcgggttcatgatcgtgagagtgcactttgggcgctgaggtgtacgcagcgcttagataagtataatgcttggattcgggtgaagggtggtggtgttactggtcaggctgaggcgattacgttggctcttggtagagctttgctgttgcacgagcctgggttgaaggcggttctgaggaagggtatgtttttccttccatttttgctcatttctttgttgacgcagttgctaacttcaattcctttacagccggtgcaatcacagtcgacgcccgtcgcgtcgagaggaagaagcccggtcacgtcaaggcccgcaagatgcctacctgggtcaagcgttaaagtggccagcgaatcctatttcctttttgtttcaatactgtattattcaccacggcaccccgagttcgcgacttgttttatatcctgtactctcaatgcatatggggcaacaattctaaggtttcattgaatttgaattgatcagcgtgttgtatattcacttacacctagagtccacggtcctactatctttaaataggtgttaataagtatgtatggactgtgtggtaaagtccatcttatacaccttatctttcttgccgcttcttcgcacgctggcaaaggccacgaaagagatattaaaatagatgccggtaaggccagacgccatcttcagttatggacattataaccgaccattccgcactaactaactagagcatgcatcgagcctaacaagcactaccgattttacctaatgtggcttaaacatcgaaaccctgcactgggaaatcgttcgtaattgatatcaagtactccgtaggtcgactctgtctgagatctaatccttacaagggtatactaactagcgaacgaatacaaataaaaagctcaaagccaagacgagcctttgacaccacataccgaagcaataagcagcatgaactactagaaaatgaaattaaatgaccccaagccccaaatccaagcccaagcccaattccaaaacgggaacacaaaggtcccgttctattttttgcgccagatgcccttgttcctttttgtgacgccccaatgcaaagcctgtccgatacatagaacagagataggataggaaattataaccgaagccaatgaaccatccacagaaagaagatcatgagactatgtacaactcgtcaaattcgtcattatggtatataagcggggaagtggaagactgtgatgattgtgatagtggccgtggttggagaatgatgaggtgatagtggccgtggtgatggcgaatgatgaaaaagtgacagtgatatttcgcgccacctcgtcagcccgagttgaatagacgataggtataatttgaaaagatcaagcgctgacagccaagccggcgaatgatcgcccctcccggaagaccgatgaccaaagacggaaggagggggccggtcgatctctcatcaaaacgaatgcgagagtgatttggtgcccaacacgaggggagaggtgatagattacctcttcgttgtcaagtatcaacatcggggttggcgcgacgctagtaggcaatagcctccccgtggcggcagcgcttgggtgatgggtcaatgcgtccgatcgtcacggtgcagccgtgtctttcccttctgggagacccgatttgatgtgacgtgagttatttggtttttggcgattttctttttttcgcttttctgctcgcctttttccgagggacttggttcatggtcgaggcactgtcgtggcttcgggtctgacagggatgtggtggaggtcgggtctactgtccatgagatcaaggcattggcccaagactagttttgggatgattaggatgtaatagaggtgcatcggagtatagcgcaaactcaccggacaggatctcttcttcccatatgcccatttgataatctactaatccgtgaggctcaagttgatcgcagagctgaattaggtcccttcccatagcctccagtcggtctcgtcgaattagactcgtatgcgcaggttgttgacctgtcgcaatcacctccagcatcagatccttttgcttttgacatatggctagccaacagagattgaattcgctccagagcttcaaacgctcggagtaatgggtgttgtcgtcatggaggaggcctacgtatcaaacaaaaaggattagcctctcactgtagatcatcaaggtatcgaatgatgcttgcatgacacgcctgtaagcttagagccaaacattagggggcaaagagaacaagaaaaagaagggtccagttgagagtgcggcttctgtgctactaggcgagggcacgcatagtaaccctgtgaacttgttcctctgtcttctccgaaggggcgaaaaaaaaaaacgataacgctagcgagaagactgcatcttaccaagttcccgtgcattggtcaccagccactcggatatttcaagcagcgaccctccagcctctaccaatcttccggctcgcgtttgatcgaaagtgtggcacaggatgcgttgatatcgtccgatggcctcatccaggctaggctgatccgacggttgggactcttgttggggctgatccactctgttcatggacccggaaccgattgcagcgaaatcagagacgggtgcagaaaaggtctgggtggtgttcgggcgtgccatggggtccgcttggttataaggctggagttgcgcatttagataaggagagagtcccgcgaccccagaccctgcagattcttctggtgcaaaatactgtggaacggcaaattggttcgacaggacatcaatggctgcagactgccgtgtctggtactgtggcacaacctcgaagtgtccctgggttggaccttgctgaccgaacccgtacagcatgttagagtcgtagggtgggaatgcagcggggtcctgcggcggcgccccccccccgccgcgccccgtggctcnnnnnnnnnnnnnnnnnnnnnnnnnnnnnnnnnnnnnnnnnnnnnnnnnnnnnnnnnnnnnnnnnnnnnnnnnnnnncatgttagagtggtagggtgggaatgcggcggggtcctgcggcggcgcgcgccgtcgctggtgttgaatagccggcgcttgttgagatcgttgagctcgtacatagtcctggggctgatagttctgcaagtcggttgactgcagggaaccgccgtggaaggagctgcctgtgtatccgtagtcgtaggacatcgggacttgctccgggggttgcgacatccccgtttggtttccacgtggtatggctgggtcaaacccatctgctgcacgaccaggtggtctgcgagcatttccagaccgagacattgatctttcattctgcttcatacgtcgatcgccatccatgaggctgtcccaggatcggtgcagatcaagctcagcccaatgcttgggggacagcggtgggcttgcgtagtatgccagcttggatgatttctgagggggattccagggaactttttccactgaaggcttttcccctagttgggggtgggggagagagagataggagggaaaagaaggatgagacgtaatccttgcggttcaagtagatattcaaatcttgtcctctgacgcagccgcgacacagatttaagtaacagagaaaacaaaatcacacaataattgaaatggaaaataaagtcggccaaaaaagtagaaggagaacaagggggaaaaagcagaattaaaatgcaattaggcaggaaattagggcagagtcaggtagacggagatattaagaaagaagagtgatggatctgaaaagaacaagatggtgagctgatcaaggacttgagtagtaagatagatagatcgagtatatgtatagtccagtccttgaatgggtctaatatagtataagaagggtataagggtaggtataagagtggatagtataagtaaaaaaagggaaaccaagggggaaacagaagaaactagggcttttcccgggaatagaggcaaaatataccccaaatagcaagtagcaaatatcccaatctcaaaatctaaaacattaagccctaaagccatataatatgatcgacgatcgaggatctacatctaaactccatttggctcgggaacccggcgcaatggttcttggcctcgagggatttggggatttgcggttttcgacatttattgcatttcttagcttgttttctttttgatttttgatttttatttgtctacaagttcagctctcgatgtcaggtgggatactttcctttcttttttcctctctgttcttcaatttatagtgtgtaacaccgtctatgttgcctggggctgatcatgaaggagagtaaacatgagacaaaatatcctccccttgcgtagaatgtagaaagggtaagagatgagaaaaagcaaaagtcccaaaagtataactaaacgcagctaaacgcaactaaacaaaatagttggaaaaaaggggatgctatttacattccggggagattagccgggcagctgctggaacctcgcggagatgcatgatatttgaggctgacatgatagcataataattaataatagtagagcagagaagatccgtcatctgattgttcatatcttatacatacataaaactaccccgtgcttaatagaccaatatcaatcaattcaaatacttgtggagcattgttcgcccgattggatctgcaaagccctgacggccacctacatacgtcagtttccttttcctcgggtttctgattgctcaggtctcacgggaaaagcaattattaggactatgaagtactggacaaaggtatttgtttatgtttactccgtactccgtactatttaccctaaagggtccctgtcatcttccaccctagactgaatccgacactttggttgcgatggctattactgcggatgcgacatcgaagatccgctggtttttgtgaagtaattgtttatacttctcccccggagatgatctgcctacactaaccttagctattaatatttaacctataaagtacatttctatgtacttggagtactccgaactttatatactacacagtatatacttaatactgccgtatcgacagatcggatcctctaactgaacgaaacaggataggatcatgcaatatgcggaagtatacatgaataaaataattaattaattaattctcttcaagaaaaaaagaaaggagaaactattgaaaattaaattcaaccgttggacagatagatactcgcgtatattcggacttcaaatcacagttcctcttgatatatctcccgcaaccaggtgcccgacacgttgtataaaccatttggtagcacaaaacacgaggccggaactgggtattatgggcttggatatttgcaatgggacctaaaaaagggagcaataatacattgttattgttgaaacaatggccttttggctactccatgtatactgttatcgaactatatctccatacctggagccatgaccctgtttcaggtctagatatcgtcaaacatgtcagacgaaacatgcactaatatctaatcttagaatcccaaaaagaaaagcatggaccgaactcttcttcacactcttaatcccatgaccaacagactcagacagaactctggaagggtcccacctgaaacacgacaaacagactattactacctacatcggatgttttatgtagacagtaagtagaccgaaagtaactggacacccccttcttcctttccttcccttcctctcctctcctcgtaaataaggaaattctattaaaaattaggaccattccctcgaaacaacagtgcctcgccttgtgcgacttccatctcggactgcagacccaacgaatccagtgcctcggaattccgaaattaccgtctcaccacgcttatccagtccggttgcccagtcaggaccacacacgtcgccgagacgggagggtgagcgtgtagataagtgtggaattacaattagcatcaaaggttatactacatagaaaggtcgatttcgcaaattaagcattttcccgacttttcgtctacctaaaaacctaaggagaagatatctaaaaaaacatatgagactaccatcgagtcaactagacatgtcattctcatcttagtgacgaaggctggtattatggatatgtgcagagaacaaatgtatacacagcgaaagcatatacaatctgcgtaatgaccctacttacctagacggcaatgtacccacgcctacccaacgatatctctcttttaaccttttaccttccattcctccctatccataccggcgtggacacatgcacagactatatatgtatgcagacagggatgggacgggagccagggtccgggagaacggcaagaacaacatagaacagcagaatgggagcgggggtagtttgtgctgccaaggttaaagcaataataagatgcaatatgcaccacctctacccgcaatgtgctgtgcaaaccgacaaggatctgtgactgtggctgctcccgtacccgactcgttggttgggagtcatccggtccacgagactgcggtccagagggaaagggatgttcgagggaggggaactggtgtttgccgaggttagttcgttgcgcggaaactcatggttggtccggatgggaacgggggttgttgctcatgcggctgaaacgtcaaagctttgttttgggtctttgttgttagagttgaggttgagtgaagcgtgtgctggccagacaagccgatgctgatgtgaggtagggaccggggtgtgtgggtgatttgtcggaggtaaagttgttgggttgtggaaggggtcatactgtacttctaacatacttgagtctgtcatgcatataccttccagggtgacattatgccctgccatgacactgggtacctgagctgataggaaaattgacacccggaacaaagaaagccgggagaagaagtcatggggaagataatttccatatgtccttcccatattgggagaaataaactacacgcatcgctgatcattgagtcatgtcatgtcgagaccaagaaagagaaaaccgagcaccaagaagaaacaccatatcgccactcaaccagcgagtaaggcaatcatatttgatctggaccatagttagcacgaagacctccaataagaaaacccggatcaaaacatactcagtgtcatactgatgctcacgtctgtgttctccaccatatccgtgaactcctcgaagctaatctttccatcctgatccttatcggcctccataatcgtcttgtcgacgatctgctgcagctgcacgtccttgaggttattgccgaccatcatcttcagcacaatgaagagctcgccgttggaaatgtaaccgtcacggtcaatgtcgtacaccttgaatgcgaatcgcagtttctcttgcttgttaccctttgagctgaatgccgacaggcccgtcacgaattcctggaagtcgacgtcaccgccaccgtcttcgtcgaagatggcgatcatcctagcataaaacagttgggtcagggactagtccgtgtatatatgtagatcgcagatcgtaggtgggagtttggagtttggatgtggatgcccagggagcaacgaacctcgtggcgagtgggttggacgacacttggggaagggagaggaattcatcacggtcgatagtgccgttggcattctgtagattgttgagtatgttagagcatattctcataatccgcgcgacgcaactgaccttatccagcttcatgaagcgcttgcgcaggcgatccacctcatcccggttgactgtggtcgcgaagtcagccacaagcccgattcatcgccttcataccctatccgaccggggaaaacatacagttggatgtagacacaatgttatcgaagagctgggtggtacccacggagccgcggcgtctccgcgcatcgtaaatcgcagcagcgttgggctcgttggtggagggctccatgttgggtagttggggagggaaaggagatgtaagagagcgaggtacggtggcgagttatgcgataaatgtagcaaataaagttgtaggactagtggaacagcaagtaaagaagggccagattaagcaagacagcaaaagaggaggcgaagggttgtttattgccaacggcccggggaatctgatatcgcccagccccgcactaaccggaagcggacaggcaagcgagcccctgaggccgtgcactcggccaaaacaggccactgccggctgacattacaacgtcaacccaaccgctagccgtgaatcacctcatcttcagtcgtcaatatctccccccctccatcaaattccatctcaaaaatacgtctacgagaaagcgcatacacagagctttgtactgattcccattttaccccgtccccgcccatggtcgttgccctattgcgcgttccgacgctatgactcggtacgggggcctgggcaggacacgccctaaaaagctcacctctaaggcatctattcccgttgtccgggagtcagagatcgatatcatcgacgatgaaatccagagctctctacagcagatcgaaaccggcgtcgaaaaggccgaggagtcggtgagtccctaattttagcctcatccccatccccatcacgtgacatcatcacgagattttcaccccaatataaaatgagtcgcgctgaccttggatcgggttaggaaattcacctgcaacgtgcaattaatgccactgcccagggcaaagtaaacgaggcacacatccctactcccgagaccattctcagtaatcttcaatatgacgaactctatcctcccatcttctcgcagcctgcgacgtacattcgcttctcctcgactgtcgaggattgctgcggatgcccgtacaacatgacagaggacgatgatgcctaccttaagctcatgaaccagaagcgtgatccatctgctggtcgttgcacagaggatatctttgaggaggtcatgaatttcttcgaggagacggcgcagataaagcagccttacgcagccattgataatcccccggtgttatcctttgcagagatgcaggacatgatggatgccaccttagaagatcccatgaagatatttgccaaggagatatatgagcactggaagtcgtgtcggatgtctgttcagaataacgcaattgtaccgcagctcaaggtacgttcttttcccatgccaatgacaagcaacgtcactaacttctccgcagttcgaaactggtcaagacaccgacgacagtgatccatttgtctgtttccgtagacgcgaggttcgccagatccgcaaaactcgtggtagagatgcgcagagtgccgaaaagctcagacgtcttcgcaaagagctggaagatgctcgcgagctcgttgctttggtgcgccagcgtgaaattgctcggagggaaatgctctccatggagcggcacctcttcaagcagcgtgctgaggtcaaggagatgaagcgcaagctcaacgtcaaggacgatgatgaggacctcatcaaccaaaaggtaggcggcgttgatactgtggttgctcaatatatgcatatgctaagcaatcacccacagccgaaaaagagagcgctcgatatgccagctcaacgtcccaatgcccctcaattgcgcatgcctctcaaggctgggcaaggtgcagaggatttgcaactcctggaagacgtgcaggccgaaaaagagaacgagattctgcgcgatatcaagcagaacatcaccaagcacatcaagtggaacgagggatacgtggatcacacccgtgcaccactgtctccttctccagaaaggacattcgatgtggctaccttccgacccgcattcacggcacagttgcccactcctccatcgtcagaatcatctggcgagatggagacctccttagacgtcactagtccgctattctctaaagacaagcttgcatcgcatgacatggagatgcacgacgtaccacaccgaatgccatctttccgacgacgagttggacgtggtggtcggttgatgatcgatcgtcgcaacatgggagcaaataaagttgagatggacccactcaaggccgaccgattcaagtttgaccaagaagattccgacgaggaccacgattatgacacagatgcgtacagcatccaaatcatgcagcatcgggctattaccatggccaaggcgcgcgaacaggctgcagtggctgcccaggctcatgcgcaggcgcaagcacaggcagcccaagcccaagcacagcgccgactgctggagcaaaatggtcaccaaggctctatggggtcgaacctcggaccaggtgccgtgacggtgtccgaaacctgaatgactcttctcctcttttctcttccacagcatttggcgggcgttttcttcgtggctctggcttccctcgtggctcggttcccttcgtctctttatccttttttcccctttaacacacttgtagttttattaccctatcatgtttcatgaattccgcgggcgggctggtttgtttcttctttttttgcgtttccgctcacctcctcctcacacatctctttcttgacatttcgtttcaacgcaggtgctagccactcatggctaagtgcgtctgcatttgttagtgtacatagtatttttttttctcccgaatctcggtggtgttggctggtgtcgggcagcctttgtatgatggataaccgaagttatgatgcaagcgacgaatgggagggcaaaggaaaaggctcaaaaacattcagaaaatctaaaacaatttaatcactcgcaaaaagcacttttttttggttctgttggggttcagtagaacagactgatatcggccagagtaaatgcaagcaagagcaaaaaaggggctcacatcctctgagtcttggactgtcgcgattcatcatcatcacagttggcagaacgtttcaatgaaccagaagtagcgggctgcagcatgcccaagacagcctgcaagacctctttctcgccaatgcggacctgcaatgccatccgtacgcgacgagcggcctcatccacgtgaccagattcaggcaacggagaaagcgaagccctaaattggaggtccgaggccaacgacgtagcatattgtgcctgtcgcttttgcagcgccttgattaagatggcggtcgcattggcgtccaaaactggcctgggagccttgtccttagccacgcgctgtttgaattcctcaggggagagagccagcgtagccagaaggaccaccaactcggctggcagtatatcttgcaaagacgggttggcgttgacgggtctgggaatcacatagccgtcctcgaggatgtcgtgacttgagaggaactctagtcggggttgggactcggtatctgcgttcgcaagccctgcggcttcgcagatagtttccaatgatatttcaagtacgtcgtaaacagcgtagttatcggtcacataaccgtaccggcggaggagatctgcacgggggatctctccgtaatcattgaagatttcctcgccttgtttaattggcttgattgccttcatgactaaggcgccttcttcttggtacagacgggcctaacaaaaggggttaaaattagggttgaaaaaaaaatttatcgtgtccaaactcacgttgtttcggtcagcatcggcgttaaggagatccgcgagcggcaccaaccccttaggcagctgctcttcctcttcgtcatcagtcatgtagctctcctcattggcctctccttcattgtcatcgtcttcggccttttcaatgtcaaatgcataggccataatgattgaccccatgacatggcccacttgaatgagggcagtgtcaccagcatcaccttcccaagacttgagaccaaaaggaggcgggaagagatccggcctctttgccaaaactggagcgatggaatcccgaattgactcctcggcgtctgaccgaccaattttctccaaaatagtactagcctgcagctcctgcagctcggcgggcgaccaaaacatcagggtgtcaaaacgagagggcaaaactctgaaatatggagcccatcttgacttttctccttgcagatattcatacaccatgaccagcatcagagaaagccacggacccatctgctcctctaaattctcgccgagcaggttcctcagctccgagttctgcacggtgaggaccatggcgcgcgggatagagaatagttcttcaccttccgggatgttgctttgtgccactagagcccgggcgagatattagagactgactatgagaattatgaaaccttcatttttggggagactccgtatgcacttttgtgtggtttaggagtatattctttcaagacttaccgacaccacgtccagctccagttgctcggagatctgcgagcctcagattgggattaagccgtacacctgggctggcttgcagccatgacatgaagttgtcagactgttgttgaaagccctcagcgtcagggaagtgggctgtagaagacatggcgggagagatcccctgggagggaaaggaggagtagggagagggtgtgaaacgaagaagcaaatgaagtggatacaataggggaaaggaaaataatggagaagaggggaaagaagaagaccgtcgggagtatgcaaagtagagagaagggtagctcgggtttagttcgggacaaccgacgggtgccgctttaaaggtcgataacgataacgaaaatcagacgccgccgcccgaggtctcatacatcgcgtatgaaggtattggctttcacttggtacagtctcgttgatatcttgaaataccgcccatcatgatcgcaattggtatggaaggctcggccaacaaactgggcatcggcatcatgctgcatcccaaggatggtagcgccccgcaggtcctcgccaatatcagacacacctatgtctccccaccaggcgagggcttcctgcccaaggatacagcccgccatcaccgatcatgggttgtgaagctggtcaagcaagctctcaaagaggctaaggtgtctgtcgacgatgtggactgcatttgcttcaccaagggacccggaatgggtgccccgctacagagtgtggtaatcgccgcgcggatgttgagtttgctgtggggtaaagagctggtcggggtgaaccactgtgttggacgtaagtacttatgcaagctatgtcataaaccgtgcctcctatttggagttggaactcgaacaaaccgctgactatgtgaatctccagacatcgaaatgggccgcctcatcactggcgcaacaaacccagtcgtcctatacgtctccggcggtaacacgcaggtcatcgcatacagctcgcaacgatatcgcatcttcggcgagaccctcgatatggcagtagggaactgtctagatcggttcgcgcgcacgctgcatatctccaacgacccagcaccaggatataacattgaacagctagcgaagcaaggaaagcagctagtcgatctgccatacgtcgtgaagggcatggactgttcattctccgggatcctggctgcgatcgatggtctcgctaagcagtgggggctaggcggggaggagaaggcgcgagaagatgaacagaagacggttgattctatcaccgcggacgagtcattagaaggcaagcctacacgcgcagatttgtgcttctctctccaggaaactgtcttctcaatgctcgttgagatcaccgagcgcgcaatggcgcatgttggatcgaagcaggttcttattgttggtggtgttggctccaatgagcgtttgcaggagatgatgggtatcatggcacgggatcgcggtggaagtgtttacgcaacggatgagcggttctgtatcgacaacgggattatgattgcacaggctggtatgctggcatacgggaccggattccggacacccttgagcgagagtacttgtacccagcggttccgtacggatgaagtgtttgtgaagtggcggtattgatatcgatgtcttgtttgaaccaaaaataaatctattatgtgttatgaattgagcgactaatctgatatcctttgaactcggtcggttaaatttgggaaaatcatatccatcactcatctcaagcggttttcaaaccatttgtattattgctgcataaatcgaagcgcctgtacagctgtaaaatcccaaatcccctcccagcacgaaagtaacgcctgaaaaaatgtgtaatatgtggtgatctcctcactagacagatcgttcaacggacattcatgtgtattggttgtggtcaatgactgggcgatctagtaataggatctagttgccattaaggaacccgagaacacctggacagacaggaaggactggcgagaaatgagccgaacaaggcagggaattgcttggaaatctttttatctctgcaaatcggacagaccacaacatgtccgaggcagtattcggtaaaataatgtatgcatgcaattaaaagaaccgcctatatgtttggacacagctcattctgtgacatcgccagtcggtttgtacaaaatagtcgtgacatactgcagacagattagttaatccacaaaggtgtatagagcagtgacttacttttcttttatacctggttgtcgcgcttgtagccaggacaccgttcttgatactgctcgtggcaaggtggttgaggacagtgtggttcggatagttcaaaacactgctatcgtctttcatgggagtcgtgccgttgagaattgacttacccaagaagagaggcagactgggaggggtagccgtatctccaatgacattggcggcctggaaataggccgggctatcttcttccttgtccaggtcggccaagaattgaggaatggcatcaccgaaatcaccgggtggcacctcttcctcggtttcttccttttctaaagggtggtcttcggtatgtcctacaacctgcttagaggcatctggcaccgtgtttggagtttgagctcccgctggaacggccgagtccttgtcatgagcatcatctgcactgacttcaatgtagttgaccagatgattagtaaagtcgacggcagtcggaagactatccgcagcgcgcattgttccatcgacaatgaatttcaagtggtgcgtgccaggtcgaaggttcagagtagtagacatgacggacggatttttttcactatcgagtgttagtcaagtcccggaaatcctagcctcatcatttgaccaaccttctgtgcagacggaacttcttctcccagttaacaaaagttccagtgacgtagaccttctgaccaggcgctgtccattcaataaggaccgggacggccttgcccgcaccactgatggtgtatggctggagctcatcaagcaactcctcctcttcaatggttgtatgacctgaagccagagtgctcggatccatccgttcgtctaagaggcgatccgctggcatcgactggatatgcgagtcctcggggccggcgacaggcgatccgggcgtggtgttggcatcgccaattggcaatggcaggcgtggtggatgttgtaggtgggccgatgcgctatagtacgaattgaggagcggggccgatggtgccacaggatcgcgccccgggacattgcgcgagatcgggacttggaccgggttggagtggtcgcgggatgggatgtccttgaccgcggagggctcagctcgacgtacgtcttgtggcgaagccttctctatgtttttgggcgaagattcagggacgtttcgggattgtagacgttcttgcacggatccttgaaatcctgccgagtgcccagcagctgtctcctttgtggccgaaggatcggccacggtggtcttcggggccgagatcgtgttgagagaggatcgacgggcgacttttcgatcgcttgtagagctgtggtgggcatgggcagacggcgcgtcgcccaccgggcctttggaagggttgttgcccatcgaaggcggggaaaggtgcgatagccttgggccgagattttgctgggaggtggggaaaggggagggtcaaactaagtcacaatggcgggctaagaaagaaacttccgacgccagctcaaagtaaggattggcggtgggcagtagtcaaagtcgattgatgtactcgcattgtcacggtacagtagacgccgatgacgccggaatcctaatccggcaggttagggcttagggctttgaagttggaccgcggcgcgtgttacttggatatcataacagtcgagacgcatagttagatgatttgccacatattttcataataatcatgagttgggtatcgatcctgaaatatcctctgttgctcgttgttggctttataatccaattactatcctacttgttgtcaactctcctcttcctcgcatcgccagtgatctacatcggacatgtcttcttatacctggcactgcttccattgcgtatcctcgtgatattagaggtatgcatatctaaatatcgtagtctttagtggtagcatgtactaaactctaatagggattcatctatttcatgactgtggctgtgcttgtcggagccactataggcatgatcctacattttaccggcagcgtcatatcacaattcctgcggattgaagagtcaaatgagccacggcgacctcgggtgaagcaagagcttctatattctgtgccccaaaatcattctttcgactatctagcagcgcagctggatgatcgcaagttcctgccctactcgacgatcttggaggaggaggagaacagctatgagtcaggctgatgtgcagatatctcaagtctagtgcataatatttctatgcctccggtctggcgctttccaaatggactctctattcttaaatacataagcctggatttcaggtaccgctcgctcaagccgaaagcatattcttgatggttgtttcaaactgctcaggttcgcggccaagtagtcgcgctagatttggagtaacaaccgcacattcaccatcgcggattccatcaaaagcagtcgcccagagaggcgcccagttgccaccaccatatgtgagaccattttggacctgtggctgcttgacgtactcgtccacggatacctgtcggatcttgattggcttatttagcacacgactgaatacatccgctgtttccttgagtgaccaagcacgagggccagagagaaggatggtcttgtttaaataagggaaagcagcgggatcttgagcgtgttgtgcaatgagttttgcggttgcttcccccaactcgtcttgtttagcccaagccaggccaggagccgagccatcgtgggggatacagatctcgttagaaggagctttgagatcgaaaaaggcagtatagagtgggaaggactctgaatacaacccttcgcgaacgacagtatacgtgaactgtgggtcttgagcgtgtagctcggccagatacttctcagtcgcaatgtgggcaagcatcacttgggccttagtattgagatttccatcaccggcaaacgcaagagacgagtaaaagatgtgcttaacgccactctttcgagccgcatcaatcgcggacttatgtacctatgaaaccagattagactttatgcgtcgaaaggttgtgggaaatgtaggaataccttaaatcgatgctcgttctggatactagcataggagatcaagtttaatgacgaaattccgtcaaacgcatggtcgagtgtctcggcgttgtcgtaatcggccttacggatgatagctccagcggctttttctttgctgagtttctctgggcggcgagcgactagcaccacttctttagcagggactagctcaagaaggtgcttaagggtactgcctccaagacctccagaggctggaaatatgccaagcttatttgccatcgctgaatcactgatgaggttaagaggaagtctactgaagtttactgtactgcttttatatccagcggatttgcagtgagactctgaaagtctccgactcggatgaattaatgtcgacttttcagctctgacatccagtggaagtccacggatggactcagtagttgattagtcaacatatacttccaggactacttaagtatcatggatatcgggaaccttggaactctttgtatgatatcatcaagttctcatctctgtcactgtgcagactaatcaaatctgggaattcttcaggcgtgattaggcgtgagatccgatttcggtagactcggacatgaagttggtcaaagcggggggtcttctcggagacattagaactaactagctcgaagaaggcgctggattacaaattcatagattacacgctttaggaagaatcccaaagagccactgcgaaggacagtggagtttgcgtatcgtcagggccaggatattggcatccagcagacacatggatgcaaatcaagcactaaaatctgtttcattctttcgagtccgaccaagaatatctctcgagcctagtgtataatactgtacaacatgataaggtacaatcgagcttactatccctggcgggtcggaccgctcatcaaactactaagagccccaggcaaggaggcgacctatcgaatcttcgcacaacatccttccacttgagatatattatatgcaccgactttgcggtctagtagaccaacgccccctatattgcctaattgggccacatatgcgatccaaccaatcacattatacacgtccagtttccaacaataaaaggtacggtgatgtagcatcctcaaatctatgtttaaataggtactctcttgataacaccaatctcagcctagaattgtccgatgaacgcagataatataaagagtagatagagagcagttcccacaatttcccgagctaagtacctacccgatccagtcatattgccgcattgctgaacttgaattgtttaaatactcttaaataccatcatgtttggacataaagatacaagaacagacttatgcggtcttgtcatgtcttgtcttgtcagtagtctttctagttctctttcagtatgtctttttctcatgtcagtgttataaccccaaaatattgtgaaaatggtttggatgtaacttaccgaggtacttgtatgctataaccaatcagtaaagccctacggaatacatgcaataacagctgcgaaaacccgcaacctcatgtgatgtatataattgaccatgtatgaagtacatatgcagagaatgtgacagcctaagcccatgcatactcctgctagaggtcgccctacttttaaaatagattgggtctcattgcattgccaaaagcacctgaggacttcttggcttgttttgtgagattcccataaactgatcttctccaccttctacaacatactccgcacgggaacatctatatttccctctgctctttttcaaatttcaatcatgccgtccgactcgaaaacatcttccaagtatatccacacaagactatggtgtattcaccgcgctgattcttgctaactcttaggcaggtcaatctttgcaaacccgccagtcaagatcattgtgggcagtgacgagcgcatttactatgtccaccgtggaacactcgagatccaccccgcatttgatgcccgactaaaggcttccactgacgaatacgaggaggcgattgattggagtggctttgacgagcagactgttgattgtgtattgaacttcctttacactggaggttatcaggcacctcaaatgacttctgtggcagccgaggaaggtgagacagatgcgggggaagaggccccagcgcaagacggggaagaacaagaagtagtggtggaggaaacagaggaagcggatgaagaagatggtaataaaccccctcttacatcttcccatctcggtatcaaaaatatcgagacactaataccatgcagaaccacaatcaccacctgacagcccacagtcacaaacttcatggccacagtcaccatgtccaatgtttcctgcacatccaaggattctgcaaccagtcgcggagtcccccatagccccagactcaccaccatccctggccctatcagagtgcgacctaaatgaccggcctctgactcctctagaatactgcgctggagtcactctgccctcggagcatgtttcggcgcaaaaggtcggagaccacgaaggagaagaccaagaccaggaagaagaaccagaacaagaagctgaagaaaatgttgctgagatttatctccacgctaaagtgtattccttcgcacggcaactcggcttcgtgaaattggaacaattcgctctgaatcgcctggccgaggtccttcttgccctagagcagacagacaagatcctattcccgtacttggtggatgcaatccgactggtctataagacgactagtactattgataatgcgaggaacttgctatctcagttcgtggcactgcggtacaccacgctggttggcgaggatctggacgaacttatcacagaggggggagagtttgtggtcgatctgtcgcataaacttgctcggaaactgacaaccatctcaattgcgtttaagaggattgaatatctcactcataggaatgaggagttgaaggaagaaagttcacagaaagataaagagctgaaggctttgagagaggaggttaggcatggaccgatacagggatttccgtctttcacatatcagatttgaagttgtgctaggcgttagtacacagtcaccgttcaatggactaatttttgggtattttttctttcctcggctcttctcatctctcacgtacatcaatgatttatcataggtatacgtgtaacgtgcttataggcaacccggacccaacccatgagccaatggcataaagcccaaccggatcctactgctcacattttctagcgccgagctagtgttcgccgatattgatttccgtgcgtttcctataccccacaaacccaatagttcctagcagatctttcttcagctgttcatgcaaagatattccggactagattctaatggcgtcgctatcacctcctgtctgctataatccctactatagtccctacttaatccctgcttagtgtgtacaggccgccatcgtggggttggcctccactgttgattttcaccgcatagcatgtccattccgttgggtgacttgtgggccatgtcctaggcgccgagcctgagatcgggcaacaacatgagacccgaacctgttctgcaagatcttgcgcattaatgatcagctgaagctggtgggtacatagtgggggcacgggtgatttcagctcagcaattgatttcattgaaattccctttctaccaccgaatacgatataagtaggaccttcttgcctggtcttagaatcttctatagtcagaaccttctacagtgaatctaattattatttcaaaatgtccacggtatgttatcaacgagtatagccacaaccaggtgaaaatacttcctattcaacggctcgacgctaacattctttgtgctataaagacacacgtttattttgaggatatagaggcatatacggatcacgcgcacacaatctatcagtaagtctatatacagcacagagtaaactcgtacaaccatgctaacaatgtattcaggatcatcgaagaggccggtttcgaaagagattcttatctaaggaccatgagctatcctcccgtcctatatttacccacgtaagtatctccttggcttcaaaggggttctgattatcagaacctgagctgacgtattaattagtgctcgcctcgatgatgatactgttggcaaattgaaggagtatggggtgcgtgttagacagggggatgaggattagatatagtcaggccgtcctttaccattggcctttggcgagcgacaagggctgcgctgcacatgggcagaagccagacgtggctgacggagagaggaaggcgatctagccagatctacagatctacagagcaattatagatggttccacaccggtttcagaagtaaattctctattattggttgaattgagacacgacagatcaggtgatatccgaatagtatcgtaagtcatgtgactacctaaagtagcttaaaacaaatagtgtttcccgtatgacctcgttgattatttggaacgacaggctgaccaattatatatagagctgatataagattgcctctctacatgaatccttcaaggcttatatacggccgaaaaagcggtctgtgcaaaagggataatcttccatttacattctggaaatggcatgtctccattgaatgacttgccatagctcgcgccttgaatacatgaccatcgacgtcattggaacgatcgtcgatcttatcgatcaagctgtggggtagaggacttacatccgagaccttccacgatgatcccgagatcctttctgcgcgtgcgagcgctgttggcagccttcatactcgctgtctttctcacctgggcaatattgacacagttcaaatcctacatccccaatatctcgtcttcacgggccattaccacagacctaacaccattacatcgccaattctggcaagaattccacgccctgctagagaaatatgcgccgggcacagagcctatcgtcgaatatcagagggcgcccacagaaggcttcaatgctcacaatgcaccgccgcgcccagataccctctacgttccggaggaagatatcacaaccatgaaagaagcgcatacggggttcgtcaatgcaatcgccgactccccacccgagctcccctacctccccaacacaaaaggcatagtctcaacagcagggggcccctacctcccagtgctagtgatatccctccgcatgctccgccgaaccggctccacgctcccgatggaggtatttctctccgacgaagacgagtacgaaccctacatatgcgatgtagttctaccctcgctgaacgcgcggtgcgtagttctatcccgcatcctcatcgcggccccagcccaaatccaaaaataccaattcaagcccctcgcaatgctcttctcctccttcgaagaaatcctcttcctagacgcagacgccttccccctcaagaaaccagaacatctctttaccaccgagcccttcctctcaaatggcatggtcacctggcccgacttctgggcctcctccgcctctccacacttctacgaaatcgcaaaccatccgcccccaccaatggacctgcgccagtcaacagaatcaggcgaagtcctcctctccaaacgatcccatctccgctccctcctcctcgcaacatactacaactactacgggccctcgcactactacccccttctctcacaaggcgccgccggcgaaggcgacaaggagaccttcctcgcagccgcgaccgccatgcacgaatccttccaccaagtcagcgagtccatctgcgccctcggccacgaaaccatccacggcggcatagccggctccgcaatggcgcagttcgatcccgtgcaggacttcgccctgacgagtcgcgggatatggcgtgtcagaggtgacgacgcccccgcgccagacgtcttctttatccacgccaactttcctaaattcaatcctgccactgtcttccagctccatgatgttaaccccgcgtttacagatgagggggagtatacgcgcgcctggacgctgccggtggatgttgtgcgggggttcaatggcagggttgatgtcgagaagggattttggcaggagattctttggacggcttgcgagcttgaggataagttccggagttgggccgcggatgagggggtttgtgatgcggtgagggagtattggggtgctgtttttgggaacggttgattttaccttgagatgtcggttcggcaggtatgagaactgacattgctattctcgatttttatgtgtctttcccggaacgcataaccaatgtctctctccggttgttgaccttgcacgaccatggaataatgcactcacatattcccccgccagaggtgtgccagaatagcctctcagaaatgacctctgtcataagaaggtcattcttgccaagagcagcaacagtatcgagaagaaaacactcttctaaaagcattcgaaaataatgctcattcacagacttctacttcttctatatgcatctcatgtatataactaagtagcgagcctcgttgttgtgaacaatctccttcttttgctcacatttcaagcgagggaacgacgacgtagcttcaacatcaagactccccaactcccaacctaagataaagataatcctggataatcctcgcaacctcctctgactccttaagaggggaacgacgaggtactcgtaatttagcttatacggaaaaagtagatcgaggtgtggaagagtgcgctttggagtcgtagcatggtgcggtgccacgggctgtggagagacctatataatggaggccttgtgcaaatgtatcacttactttgtagttttagctagatcgaaagtaatggggatgaatggagcagtcggcgggtctgatttggcgggcgatgagtgcaagatatagagacagaagaaaggaaaatacagagaaacagaggaagagcagcgaagacacttcatatcagtgccgtttacacgatacacaataaacgaacgaaaccgatatggtatgacagagccaatgcgttgactatgcaatagtattcatcgggcatcacaaaccacaaacccagccatctaaaacaggtaagaatacacaagacgggatatctaagaaacaacgcaaatgggaggcagaacgaaaagaggcctatgctcagtatgaatccatgcatcaaccacgagaacagctaatagctaaacacacctcaacgcttcacaatcccgaggccctcctctagacggtcaagcagcgaattcctcgacccaaccgatgaagcaggtgacggggaccggtcatgcttggctcccgatgtagtcatgacttccggcggaacatacgcatcgacgtccaattgcattcccaccgtcaaatccgcatctggagggagatactcaggagatagaccgcttgttatgatattggcggcgttggcagcatgggcagtagcagaggcggattcaaagaccgccccagaaccagagccagaagcagaagcagaagcagaaggagaagcattttcggcttcagcttcaggaggagcagcaacatccctattccggaagatgtatctgtgctgtacaggctcacccacaggaggatcagcctccaacttagcccttctggcgaggcctttttgtcttcggcgactcggttttttgccaattgggtaatcgtgcacgtttggctcgatactggcgacgactcggctgctcgttccattgtcaacgttcggtgtgggaataccgtttggctcctggtatttagcttcgacggtggcggcagcggcggcggcggcggcatccttagctcttttgcgcgccttgcggctcattgggatttccccgtttttcccttctgttttctgttgggattgcgttggctgggtagttgtagtggcggttgcggatcccgtagctgcagtgttcggggctattataattgcggcattcgccttggctctagccttggccttcttatttctctttgacttggcagttgtaggagcagggacatctctcgaaccatcaaacgttatgggatcgcttttagagccggcattcagctgctttggagcgttcaactgcgttgggaggagactaatcccgccgtcctcatcgtcgacagaatcctcgtggaggccgatgtccaaatcaaggatagttccctcgcccttttccacgcgttcgttccaggcgtggaggaccttgctcacgtcgtcgtggtgggcgagataatcgagacggcgaaggaccttattgaagagctcggtctcatcgatattaggatcattgctgaactccgggatctcaaggatattgtacggctcactagaagccttagttctgctgtcatcgataagaatagtgttggtctggtcccagcggtggcccgcggtgagctttgcagcctcggcatcgcgaagcctttgcttgcggttcttgtgcggtgtattggtgcctggtgatgaggcaggggggttttttagatgctcgttgcctgggaatgcgccttggatatttgtctccgcccagactttgtgcagctccttgtagacctggagctttttgttgtattgaactgaggtcagaccgaacttgtcgcgtccccagcgggcgacgatagcatcatgcatgggccctgggaagatctgctcgcagactgcctctacagtctgcggttgggagctggaccagatcatgactttgtagtctttgattagcgtggctaggaattcatctaggcccgtgcgtctggcgaatttcggggggaatttgcgaagcttgcggtagatgagggtgccattgagatcgaggataacaaggagtggtcgcttttcggtcttctctggcttcaatgacgcttggtttgtgtattgcagtgtgggaagcgggattttgactggtggtgttggcgagcgttgtctttggggtgatgcgaaccgttgtcccgtgccaccggccatcgtactcatagatcgggtattttggaagggtagtggggtattcatatcggcagggaaaggaaaaggtgggaatggcatcccgctatcaaagcctggattcatccagggcatagcctgtgccatttgaaagaaagtttgatccatgctcatggggttttgcggcaaagtattaaaagcgccgaattgttggccttgtcccaatggtatttgtggttcgtattgtggcatggtaggagcatagccctgagattgataggccggtgacgtttgattagcctgtggatgctgatatccaaagttcgagttcatgctctgcgtaggagtatactgcgaaggtataggattgccttgcacaagatagtcatatcccgcattacgatgtacatcccgaggggcattgcggtcccaagagttgtgtgagggggcctgccgacttcccccccgtccattctttgctgatccagggttcatgttcacctcataatctgaatcggcatgctggggaactgaattcgactggtgttcggacgtaggacgtcttttgtttgagcgggacagcttgagggaggtgcgacgtgacgaaaggagagtagagaatctccgggatttcaaagcgctagaatttggcactgcaagaagctatttaaaagtaagtcagaataatcaacaatcgacatatgctatccacgtagcgaatagtggaggcgatacctgattggctgctctgagaagatgctgagagtgacgcgaagagaaagtaagtggggagtgaggggaggctcggccacgcagaagatgcaggaacatttataaaacaaacgcaaattgcccaggtggttaagaacgttcttcccatcagggcatcgcgaaaaatatctaatcagttcttatcgctctgaccgccccaagcggcaatatttttctttttgacggttcttcctccgcggggttttccaactacagcaacaccaaaatggctattaccgatctgctcaatcgccgagtgcgagctcgaccagaagacgaggatgtcttctctgaagcatcaggttccgacgaggattcgcaagctggctctgatgccgaatccaactccaacgaatcagtaagccaaccatacatctacttaaaaccaaattaacaaacaaagcagcacgcagacgactcctccgccgaaggcacagacacaggatctaattccgactccgactctgaaccagacatagaagaaaaaccagaatccgaagccgacaacgacgacgacttcaaagcctcactagcagacatctccttcggcgcgctcgccaaagcccaagccctaatgcgcgagaagaacaagcgcacaccaaaagacggcaccaccgccgcctcctcaaccgtcgacgaaatccgcacgaaactccgcgaagcacgcgaagaaaagctcgcggcagcctcgaagtccaaatctaaagaaaagaaaagccgctcctcgaagcacgcgccgatggagcaatcgtccaaatacgccgtgacgcgcaagcgcacagcagtagaactcccgcccgcgccgcggtcgcgcgacccgcgcttcgacgcagccgtcatgggccacagcggcgtggggaagcacccgcacggcggaacggcgtatgcattcctggacgagtaccgggcgtctgagctgaacgagttgaaggagcagatgcggaagacgaagaacctgcagcagaaggagaagctgaagggggagattcggcgggcgcaggataagctgcggtcggcgcagaataagaagcgcgaggcggatgtgcaggctgagcataagaagcgcgagaagcagttgattcgggagggtaagaaggctagtccgtactatcttaagaactcggagttgcagaagcaggttcttgagaggaagtatgcggagatgggatcgcgggagcgggcgaaggcgctggagaggaggcgtaagaagatgacttctaaggagcggaaggagatgccttgggagaggaggggggcggagggtggtgaggatggaggcatgcctaatggagggaagaggcggaggttggagtaactttttgtggtatacggcgttgatctatctgggaataaaagcacatatagcatatgagtattgaatatctgtttacatgtccacgggtatatgttctcgagtgatgcattaaaatgaccagtctcggagctgagggccctgatggcaatagcaaaggctgaaaagaagaaaagaaggcattccaaataggccaataagaggcagagaactcattaccataatgctttatctcccaaaaacaagtccaaaaggtataatacgaagcaatgaacccgcaacgcccaaagcaaacttgatgcagaaaagaatccaaacacaaaatttttacagggtgccaatctgccctgtcaatactgtcgtggcatagataacatgaaattgatgcaagcatcattgggtatgatggaaggtttccagactcgatcgtccaggatgagtcggaagatggacattcactgcccaggcattgcattggttggacttgccatggaccaatgtcgcctgggacttagtatcaaaggcctttgcattccaaggcagcaaactcctatgagaatataagatgatagcatcgggatgatctgagggttaggcatttgccagcaagtaggtccaagcaaattccatcattacttgaacttgggaagcagagccggcctaagcctctacaagaggcatgagaccaacagagcatgtcgtatcacgagtggaacaaatcccaagcccgtgcacagagacccaggaattcatccttctttctccgctgcgtctctggcgaatctcttcctgcaccgaaaggtccagggaacgaagcatgtggaccgggcatggcagctggattgggccggtattgagattcgggaccatgacccagtggcggacttccgttgtcctgttcatactcgctccgagggcgtcgacgtgccgtaacatcggacggggcaaacataccaaaagaggctggaggcggaccgtggggtgcttgcggttctggggcaagaggcgcggtcttggggcctgcgtggtggacttgtggggatggcggggttggaggttggtggcctccatagtgaacaatgcgaggcagcagctcctctcgtccgccggacatctcttgcacggcctcttcggccgagtgatattcgcggggtcggctgggggtgtgcgccacgctacccggcagaccaggggagggcatcggcgccaagttgttagattgggaggagttgctgctcgatgcattcaagtggatattcgcccggccagaatcccggtcccgacccaatgcatcggaaccaaagacgtcggagaggggaggaagacgattgtttgtttgggttgccggcagctggtgcatgtgggaggtcgagcccagggtcgggctctggttgacgacatggcgggtcaatggctgcggttggtatctgccagtgaaagtctggtgtagcggagccgattggatgactcgctcgtttgcgaactgggaagcggatggagggacgatggacaggccgttcggaggtctgcgctttccggtcttgggcatccccatcaagttcgactcagaaggcttcataccgtccggaccatcatccttggcggatcggtgcatgcgctgttcaatgatcgatcgctgctgatcccgcacggagaggctgcgctgcagctgctctcgcatgatcggatcgtgggtctggaagccaggcgacaggcacgccaggcctacatggtgcattgaggcggtcaaaggtccccccggagcacgaaccgacaaaccactggaggatggaagactagtcgagaggtctaatttccgaggccggggccgactctgtatccgtggggaggatcccggttccttctttaccgtaatgtgcgggcctccgttgccaccttggggtctgaattatgttaatatgtgaagctccggttccatgaatctctcaacttacggggaagttggacctctcttctcggtcggggaaccgtgtagcgcggatcccactttagggcttttggacatccggggcggagagaacttggacggggtattattcggaggagccaaagatgggaggtttcttgggcttgggttgcgagtcgggtgtggcgatgacaagggggccgccgcggaagcaactgcggtagacatggtcgagacgatgagatcggttttaaggtatcacacagaagattccagtatatagtagttcagtgtgttcagtgtgttccttcagtgtattcactgttcactgtatattgacttgatactcctttagaagatgcaagggcatctggagtgatgcgggcaaagtccgaaaagcggatcgaaacgtgggatcgcctcagtatatccaagtgtagagatatcccacgagaagagggaagaagggcggttaagcgtcaagcggcagaccagagtccagagtccagagttacaagcgagagaaatggacgataaagaaagtccgagagggggtcgacacctccaggcttaggaaaataaaaaggaagatgagatcgccgaagctctccaggggaaggttaaaagaaattaatccggcgataaagtacacagtacgttgatcctccgaatgacaaagaggggaaaaaggcatcagcggtcaccccagctaagtaccagatacccgagctgcccggtggacccaactgagacacgatgtgtttctgtttaggatccaccgattttattgtttgaggattgggatatatttgtagagtacggagaggactgtaattagtataagagtgtatgttgtaccttgtgttttgcacggaggtccctatatgtactaaatcccactattaacaatagtcctccccaactactccgtaccaacccttaacaactatatttatctcgcttttacacttcaataattcgctacacggtggatcccttctctaacagtagtataacaagcaaaccagactagcacctcctgataccaaatttatcgaatcacatccccccacccaacctcatcctgtggacgcttggcagagaaaaaaaacatgtcacatcacctccatccactcgcatggcgttatacgtcaaacaaggcgcagcgggcgcttatatcaaaggggccactagtgtgtggcgtccaaagtcatgcgagtacgaaaacactgaaactgaaactgagactgagaataattcagttattctcacgggttacctatttcgagcatcgctattccgtatagagtaataatagaccctggcctgcctctgaaattagaccgattggcctcctgtcacggcccttgtagatgcacagaccaggggtgcgtgccttgagttgcatatcatctgtgcagttcttagggtgtcgatgtgagatgaaatggctgaaaccgacattaccttgtttcatactataatatacatgtaactattgagattctacgtttcataggatattattcatttaactatcgggagatatccatgtaatatagttaaacctcgtatacttaacccgtcatactgcaggtatgttcaaagagggaatcattatacttccacaggagtatcttatcgtctacggaaaggatctactcccaacattattctgcgcatagtgggggactaaatggttgataaacactgcgtgatccaccacttcgtattattataagaacctaggtgaagacttttcaaaaatacaaacattatcacataaatctataacaatctaacattctaacaatcctattagaataatcacacccttaatcttcgacaaatgcaatttatagacaaaaacagtaggcggtgagacccgactatcgataacccacctttttttcttcgcgataatcttcgacttggagatccaaatcgcgcaaattcgttaggccaaagtccaagcttccaagccaaccgccagcaaagacatcaaccgaccgtcttgcaaatcccaaccacccaccccaaatcccaaacagccaccctcacaaaaccacaatgcctgaatccgtccactcccaagacctggaccagtccatggtcgacgcagagcagcccgtcgagctcctccagtccaacgaccccatcctcgaggagcgacagattgtcgtggtacgtatccgatctgcgcgggtacccaaatagacctcgcgatcataggcctaaagagagcatcaagctaataccatatttccttacagctcgccggcgccaccgaaaccgccgcttcattccagtttgaaggcgaaggtcacactatgggtaatgcgctgcggtatgcgattatgaagaagtgagtgtattgcgctgcgagactagattcggtgtatcgatgttttcggttcatggaattgaggttgaaggtttcggaagaacgtcgctgacttgttaatagtcctgccgttgagttctgcggttatactattccccacccctcggatccgaagatgaatgtccgtatccagactaatggtatgttctcctactgctactttcttgttctattgccggatactggatgtgggatgtggattttactgactggacacagatacgactactgctctcgaggctctggaaaagggcttcaatgatctgatggacttgtgcgatgttgtgacggagaagttcactgcttcgcgggatcaatttaatgcggagagtgggaaccgtatggaggcatgaggtggtttgtttgcatatgtattatttaattggcgttctgggtagggggaaaagtatattttctagctcgggcatgacaagtgcttttggttttttggtgtatagtttaagaaatacttgatgaacataacgaagttattcgtgatgcattctacgaacttattaccaagatgtgtgcagccagcagcaagtctcaagccaggcttgacaggaacgagataagataatggaatggcttattcagacaatatatacacatcatgtctatcgatggcgcagttccttgaactgccacatcgcggaccggaaacgagatgaaggggataggaaatgggagagaaaaaaacagaagggaagctttaattgcgaccctcgaggaaaccagagacaaagttggggggtagccgtgcgccaggatcttcctctgggcggaagtacttcatgacatgagaaagctgcttccagtagttaagggtttcctaggttgatatgatgtcagcatttgatcttgaattgcagggtgactacaacaatggataatcaaataaagacgagaagcattagttctcataattgtcttcttgaaagaatcgcatgttgcaaaggcatattatatacaccgggacagaggttggacctggactaacctggtactcggcgtggctctggtacaacagcacatccacgactggcaattgcttgacgtagcgatgtctctcgaactcctggcggatcttcgtgcggatggcggatacaggcatgccgagggagtacatggtctggatctcgggggactgtacggtgataccaggttagctgagtccgttgcgggtcaaattgtagcctttgaagccaggactgaaaacgagccactaatcaatccgctcctgcgatatctgccaggaacggagtaaagagcatatcaagggacaaggtggatcgtctaggatctcggggtaaactgaccgcgcggagccattcccggtacgacttcaggactcggaatttcgcatcgccccagttgacagctagaaaatgagcagctatattagcaccgtttcgcaggtgggatagactccgctgacgatcccgccgggtggacggcggaacgcatcgggcgtgggagggacgtacaggagcgcgagcgctgcgccagataggtagggttgatagtcatgttgaggagagtcgagtgcccactcaatccagcgtggttcaatcactggtgcagaaagacgggagggaattgaacgtgggttccggagctatgagggtggaggtttcgatctgaggttggtggtggaatgggctaggctcaccgcctgccttttcaaaaaaaatctttgcgaatttggggattatcggaccgtctgcgcgacgttctctgctcttgttttttttctgtcgaatatttttcgatatctctgattcggttgcagagtttattcgatttttcttgggttgttgaagtagtcgcaactctttctcgccgctctatcaatctttgcattcctcaatctctgtccgcctcgtctcaactcagtcaattcttcaagcactacgaaatggctcctaacgtcggaggtgccaagggaggcgcaaagggaggcgcaaaaggaggcgccaaaggaggtgcaaagggaggcaagtctgccagtctggcggctgcctcgcgcgtcagcaaatcgaaagatggtcccaagcgtccccccgccaaggaacagaagaccaagtcccggactgccaacgaaaacctgaagagaaagaagaagagagtatacaccgagaaggagctggatctgcccgagttgaaccaaatcacacccgttggagtgatcaagcccaagggcaagaagaagggcaagactttcgtcgatgatgcggtacgttttgcttcccatgctatgttctcttgattgcacctacggaagtcttatactaatactatcacctacaggagggcatgatgacaattctcgccatcgtgaacgccgagaaggaaggccagatcgagtccaagatgatgaaggctcgtcaattagaagaaatccacgaggcaaagagggccgaggccgaggcccgcatgaaggacaggaagaacaagttcgacgatgtcaaggattccattcgtcaaaagaagaagggcaggggtgacaagtccggggagccaacgagtatcaaggatagtatctcgaagcccgggcgatcaaagaagaagaccgttgcatttgcttaaaaaaagtctgaaaatttgtgtctatactttgattatgtatttagatgtcggggttcggcgttttcaccggtttatcaatctatgtctatcggaacagaaacatcattttgcataaacaccgtccatgctgtggttccccttgtaacccattatgacctgtcgcttttgaacctggtgattgtagcagttggttgggagggcagaatgtttgagaggcaattacagagaggcaattacagccccaaaggtagtgcgagtttgcgtcgcatcgagacgtattcaggcttaggtgctaggtcaggctttttgttggcgtcatcgtggtaggcaatgtttccagggagtttttcagggtgttcaacaacaccagggatactagtgtcaatttcccttgccattttgttgaagaagttcgccaccttaaggaacggttagtatgaagttaactttcaattctaatgtccattgcgagttacataccggcttgacaaaccacctggaccctccaagctcgaaccagccgagatggccaccccacgatgtagtcaacatgactccatatggcgtttgagtcatttcctggtagggcaaagcctctcggcaagcaatctataaagtcagcaatctttcaatggtgacaaaaaggacattgataacttacaggatcatcctcggcttgaatgctaaggaaaggaatcctgatagcaagcatggaatcggtggaagtggcatcacggtaatacgctccctcggtggggtagccccaggtcggacattgcagagctctgttgcatgttagaatcgcactcttttggccagaattaattcttcttaccggtcgaactcatggaggtaggtaatctttcttatcgcttcaacatcgatacgagggtttgtcgagacttgatcaacatgtctgtttcacttggttagttaccttttctcatcagccgaacagagagttactcacgcctcgaagagcttcttcatacttgaccccatggttctgctgtatacctccttgccaatccaggtgctttgcaaaatcatagaaccaatatccaagttccacgggctcgcacaaatcacggccgccttcagttgacagttttcaccttcctctcccagatactacacattttgtcagtgggtatagacagtcaggtttgcaggggtcatacattagtgaggatgttggcaccgagtgagaagccaattccaaaaagagggcgattagggaactgcgccctgatccacttcacagcctggcgaacatcccaagtagctcgagcattgtagagaacaccggtactgatgtttgtctccgcacatcctctcgaattgacaacacatgcttcccatgcgccatctttcacgagcggtgccaggacttcccgcaggtatacttcatgggagccaccactcagcccgtgcagaagcacaagcatgggcttggtgtcatctgagggcagcgcagcaaattcatccttagagaaaaaggatgtacgtgatggcagaccacacttttgcgtatactttctcgcttgatccgtaagctccgggtcttgaggcatgtcgtacggtgcgaccacgaaatccatggcataatggcccgagaatgcggggctatctgactcaaaaattttacgtttgtagtaaatggggacatcgtcgtatttcatagttgtccaggctgtctgtaggtgcccattgaacaagaaagggtttaggttgcatgtttctggtgttgcagaccgacagacatccacgaaggtagttttttctttggcacctccagcaccgcagactttggtcaatgtcaacttattgtccgtggcgtgatggaaagctatgcggcccttgggacgaagccatgaaatcaagcccatggcgattagtccggataagaggactgatagggggattgaattcagaagggtcgagatgaggtcgtgcatgaggaatatctaaacactaaagaatgctcaaatcaaataaacggacaaattgatatccaatgactcttagaaaagaaaaaagcaggcttaaaagcacaatgctgatcgaaggatctagagcccaaagttgatatggatctgacctcggcaaaaaattatgttcggattttccgccccttgcccatggttcagtgtgactaagctgattttatgcctttgtatgtgatacatatagttatgcacgatatgtcaggtgatctgtgtcgcaaggatggcttagtcatgattctgagggctgcacgggacctgataacataacatgcgggcgtttttcgtcatgcacgtagtcagttgacaatgtcatagcgcagacacggctgagattaactttgatgcaggaaaccctccttatctggcgcagttgggaggagttgggggcattccgccgaatacgaagtgatgatgatatgatgctcaatgcggcaatcgccttgccgcatgcggaagccctaaatgcacttccggcgtcaagcacagggagaaatccccatgtcttccgacaatagcaatgtccttcttaaatcgaccatggtaaatgtagggtggaaatgttgaagtatccggtgctctgcatatggatcatcagacaaagaacggctaagccaccaataatcagttcctctgcctctttatatgtaatgctgatagcatttacacccatcttttgtgacctagtcccatggtccgtttccgggaatctttatcttccaacagactacttcaaggtcaaaggacctgaacctgctctcttttcttttgaaggtgatgcagcactggttgtcacacgatgcgcttgatgtctactacagcatgataagagtcgaaacgccactacccatcttgctgattcacaatctctcatgaggcttggtcactgaacatatttgagcgacctttaatctaagcatccatggctttaataagagactccccgtccgatatgtccgatcgtctgtaccgcgctacaaagaggttcaagaccatcatcaaaatgagaccctggtcaaagaagcaacaggagggtggccatggccgttgctacctcatggaattacccaccgagttgttgctggagatcgtatcccatctgacagtgttgccggaggctgcgcttgcactgaccaacaagcgcatgttcgcaatctccggagagatcctactctcaaaatgcctccgtttcaatcgcgactttgcgccgcttttccaccattaccgcaatggacataactttgacacgccccggtgggcattcctcaacttgttggaaaacccccgctggaaactatgctccaagtgtttgaaactccaccctcgagccgcattttcatccagagagttgagacggaagccagaaagtcgaacatgcaatatcggagagttagcaggggttgtcgatctatgcccatgcaagaaactaactttccgcgacaaactcgatctcgcggatcacgttcgagtgcgacaggtgacattgcaagccttgaaatcacaatttggggacgccgttgacggccgctactgctggcatacatgcaccgagcagtatggcgcaaccgagctgaagacatcgttgtttccagaaatcaatgccgacaaccagctagttcttcgcacagaataccaactcaccaccgagtcgggccaagtgggcaaggaagattacatgacaccacgcttcggatgtgcacatcgatcggtcgacctgtggctctcgagcgttcaccaaaccacgatatgtcgcctcttcgactcttcctgcccgtcctgcaagcgtatatcggtgtgcagcgcatgtgatacgagattgacatgtccacgaaaagcaccattccattcggagaagtctggcagagcgacctattcattctggacccaaagaagcctcggggggacgggtccagctcctgatccggcatggggagcacaaagaattcatccagccgaaccttcagtcagtgtcgaaaactgcaacgagttgtgtccctggacagtgcgcgagcatccagcgctctcattcgcgccgagtatagaacgggaaataatcgactctggaataggtaaccaacccatcaaccaactgtacacatacatcaacatggtttaacggatttgttcagctgcaacagaggcctagagaagccttgggagctgcaagataaggagttgatggaccaaggttcattttttctctcgttccgacttttgtctatatgttgtatagtgagcatcgtttcggcgttagattaatcttttgttagcatcatgtatttagacatattcatataattcaaccattcaaccattcagagaagaagtgactcccacgtccttatggtaatctttttggtggtctttttctatatctctttttctgggtagagggcggaaaaaacgacttagtctgtgaaaacaactttctatatataacctatgacaaggctggctagtaacaagaagaagagcgagaaacacacaaacgaaactaaaaagcaagcagctcttcaccacacgatcgaaatcgaaagtgtttgagtgcatcagccagtcgtaagccaatattccaatcagctagctcattcttgaagtggacacactgacatggcctttagtcggggctcattacacagaccagcatgaataatcgggttgattaagaactagtatcgtgataccataataaatgacacttgtattcaaaataggtgtcaaggctttggctagtgccaacacttaccttcttttggcttcttttgcaaggtcctttgttggagtcctttggatacatatcctttggcttatgcaaatgtctcctcggttgaaaacagcttaaagcccaagccaaagacaacctataaattttcagatataaagaagtcctatacttcccaaggtcaatgaagtcaaggtaaccgcaacaaaccttatcagctgaccgcccgtggtttatccggaccgacaccaggctccacgcccgcgctcaccatcccgcgcgttcgacttcatactcgatttatacgagtattgttcgtttctcggggcaatgagctacccaccacctggtcccggccaatacccgcattatctaccgccgccacagtatcagcatgggcaaattcccccgcagggactgtacaatagccttggtgctccgccgccatacgataatggctatggcaagccattgatgtatccttcgactatgacaccatacccatcgacatataccccacaaccgcagcagcagcagacgcgtcctccgcagacttcaccgcagcagccgctccaattaccaccacaacctctccaaccacggccacagccaggaccacagcttctctctcaactaccatctccccctccaccccagccgcgtcctcccccgcctcaacttcaactagaagagctgcaacatcagtttgtaaatccgtctcaactgtttgtacaacaacctctgcctactgctccgcgatcccgatacacccaactctctcagtatggtgaaccagctttcgtcccaagttctagtcctccaaaaatatcaccggctgctctgccagctccgccgccagtcaggcctattcacattgctcctgccccgtctcctattactcctaaaccaaacacccaaaccaaccaaggacaagccaataaccatataccgcaaccacgccctatcgtcaaagctgaacctacgccatccaagatctctcccaaagtaaaacatcagaaaaaaccttctacacctatttcgacgccgaaacgaccccagcctgctccttttccggcgacacaggctaccccgcaagtcatggcccgagctccgtctcctgttcaagcaaatattcaaaaccagactccgaagaagcaagttcaaccacaccatattgagaagaagagacagccgactcagccaaatgttgaaaaacattggaagccgacgcctaccaagtctacaaagcctccagtcgactatcaggttctgctgttatccctggctgatgaatatttaaatgctgctcatgctcgtggaacaacgacctcattgaccgctcgagagactgacgttgaggaatattacaagctggttgctaccggattgggctgtttggaggctgtcttgaaggttggtgaattgctctattctaggaacagcgcgcccaagctaaacaaatgatagaactggcgactgcaacctcgcaaagaagctcttgttagacttcgctacgcgcgtacattgtttgaggaaacagacaatgacattgaagcggaaacagcattgagtaaaggggtgtgtatttgtttccctctgttccagaatagcactaactcgagcagatcgatctttgtgaacgagtcagtcaaccgaaacttaatagcgaattcgttttgatttctgactcttatagaaccgtatgcttgacttgaaatacagcatgcagcacctgttagctcgaatgctccataaaagtaaccccaaagcttccttgaaagcggttgatgggatgatccaggatgtggaagcgtatgtgccattccacctttgaccacgggatgctaatatctgtaggtaccgccatgccgcatgggagtacgcattccgctttcttcgagtatcactttcgctgtcatctccgtcacaccaagactccgtgcaagcgttgcagaatcttcacaaaatcacggctatggctaatcgtaacggggacaaggctgtttcggcaatggcggctgtcattgaatcacttgcacacttgcagcaagcgacaaattcggattctatcgagcaggcgcagcgcgccgtggctgtcgcgcgaagccatcagctgaacgatgaacttcgccatatacctcaacttacaaccttaattcaaatggtcgatatctgttgtagtcttctagagtacgacgtcaaccagtctggacagaagttgaaggtcatgcaggctttgatggatgagacactaagcgacagcaactggcgtcccgatgggtcattttcggtccctctcaacggtaaatcggccgggccatcatccatcgacacaggtgacatcttgcaggttcagaatgggacattgctattaagcttcaactggctccctcagcacgatctttatgcgctttgttatttcttaagctcaatcacactcagtgccaagaactcatatgatggtcggaaagccgagaaatatctcgaggaagggcttcgaatggttcaaggcaatttcaaggccccccaagaaatttcagaatccatggtcaatgccaaccgtcgggttcagtggcgtcagtccctttactgcaaccttctcctccaacgagtcttcctggcttgcgctcgaaccgattgggagcttgccagccagactctcaacgaccttcgacaagtcttccaagagcttggttctaacctcctaggtaccattgaatgtctgatggaatatgccgccgggactatcgcacaggcaactggcgatctcaataccgcgctgaacatattccaatcaccaattctgtcactagaccccgctaccagcaagacaggacgcaatgacccctgtcgtgatacgcgcatcctcgccggtcttaacaccgctcttatcctccgtgatccaagtcactcatcgcacccctcgctcagcgcccttctagcaacgcttgaacccttctgccaaggcagtccaaacaagtatatacaagctgcctacttcctagtctgcgcaaccgttcactccgagtctaccatccaaaccaaacagtacctccagcaagctctgcagtccgctactgcaatcagcaacagccaaatcacctgcatgaccctaacattcatgagctggaagtatttccgcggcgtggtcggcgagcaagctgagaaaagcgctcgagccggccgtgcaatggccaaacgagctaatgaccggatgtgggcgagcgtcaccgacgacatgctggctgagaccctggagcgacagggcaagggtgaggaagcgcagagcgtccgcgaagaaggccaacgcttggtatcgggtcttccgccccgtctgagacgtccggcctgattggcttgtctattgctataaacatgatatacgtttttgtttttttctatgtttttctttgcgtttgtttcagaatttttcttaggaggcgctcgtttacgataccatttgatggctaccagggaaggcgtttgatattctgcggttattgacacggtgatattattggcgaatccagaaatacctttctaatacttaagcacggaagtttacccattgatgagtaggaaacgttgacttgaaaccattgataggactcagctcggtgtatatcacaccctaggaagatcactttcgctccctataaaaaagaacatgaacacccgacatcatgcgtaagtacaaacaatatggtataaaccaacccgctgtcacaaaacacaagcttcaccagtcgaagctagacgaaacaaaaaaaaagaaacaaggacaacagcaccgccgaagtcaactccatgcccacaatacgccagcaatgtccaccagacctcttccctcatcaacaaggaaagaaaggccaccctcacacgacgaaattaatattaaactcgaaacctcccccttcctccacataatcgaaacagtcaacggacctcaacccagcccagcccacacgccgcgaattctccgcgcaagctggatatccttctgcataatagtcacgcgcttcgcgtgtagcgcgcacagattcgtatcctcgaatagatggaccaggaacgcctccgcggcctcctggagagcttggatggcatgcgactgccagcgcaactcggcgccgacctcggcggggagcaggtcgagtgcgacttcgcgcactaagcgcgcaaagggcagtttggcgatgagcagatcgtaggagcgttggtagcggcggatttctttcaatgcgacggtgccgggcttgtagcggcggcggcggcctgtgggggttgggtctccggctgggaattgttagaatggggagattgggattgggttgcgcatgtggaggcgtgtaaggcgcttgttttggtgggagagttgaacgtacgttggacgttggcggggctcttgctgacttttgacttccctccttttgtcttgcgtgctttggttggtgttgcatcgtcgccggtggtgggctcggcggcgggcacggcggctgtcttgcgcgctttgtttttctgtgcgctgcccggtactgttttgcgggcttgcttgggcggcattgtgttatatgagaaatgcgctgtaggtatttttcgtagtggggtgttgaaagcgatcaattagaggttgatcgcctggcaaacagcgttctgccgcgtttatgtcgagattgccccttgcaggaactttgtccgagtatcgagaagacaaaggtttgcacttgcgcacgaggattttcgaagggattggatttaatcgtatctgccgacaattgaacagtctttgttcggaaatgctgggaaagctatagcaaccattcgggccttagcgccccagcccccgtgattctcacgtaaacacgcgtctcgtgtctggcacgtgacgataaactggcctacctggtcttatctccgtcatacgttgaataccccggaggcacttggagagctgtcagtgctcgtggtgatcacactcccgctcctttcgattcccgtccgcataagaagtcacaacaccacacgtcatggccgccctctgggagaacaatgggcaacccggccagtttcccctcgagcaatggttctatgagatgccacccgtcacccggtggtggacggtagccaccgtcgcaacctcagtcctggtgcagtgcaacatcgtgaccccattccagctattctacagcttccgctctgtctacgttaaatcgcagtactggcgactcgtcacgacattcctctatttcggacccctcaacctcgacttactattccacgtcttcttcttgcaacgctactcccgccttctggaagaaacctccggccgctccccggcgcactttgcatggctgatcttctacgccatgacgtcgctcctcatcatctcgcctttcctctcaatacccttcctcggcagcgcgctttcatccagcctggtttatatctgggcccggcgcaacccagatacccgtctcagtttgttaggcctgctggtattcaccgctccctacctgccctgggtgctgatgggattcagtgtgattgtgcataagatcgtgccgaaggatgagatcctcggcgttgtcgtcggtcatatctggtacttctttaacgatgtctacccgcctctgcatggtggccaccgcccgtttgacccgcctcgctggtggcggcgtctgtttgaacccgtgcctcccaacgagcgtgcgacgggtgcggctaacgtgaaccgcgagtttgtggctgcggcggcgccccaggttcgatgaagcgtattctttttattgatctagtgtcgctttctggaaggaatttgaggtttcttgtggcgttgaatgggaattgagctcgatctcttccacgaaagacatgtctcgctggtataagcagagccaagggtgcaatgggtccgattctagccttgatgtcgttcacgggtttaggcttttgatatcaagaccgtgggccgtaccagaggggaagctgcatacagcgagtttcttggttacatcagatgacagtatattatattgttcgagttttgcatgagacacttgctgaacgtggatattggcagcccctttaggctgtgtccaacagtggcacgatggagcagctgctctttatctgatgataccccttatctgatcatgtgagacgttgcccttggcccatgctcaatgtgatctatcaaaaaagcaaggagtaggacccgattccttttgtgtttgcaggtgcatttttttagataggaatagccacagatacccagattttttctttgcttaccgcttagagctgcatgcagaccttaagatgacgacatatcaaacagtgctagtacaagagacattcgacttcgctttgaccctcgatagacccttaaagttaaatgaagtaaaccacaccacgtgattgcatgcattgccgactactatcaaagctccttatagaaaacagccaagcatgatggcactatgccaagtctatacagcttcgatcctgcatgtgcatagtatcgacaggcctatttaaaacaatataggcagcgtagttaatataatgcagcctagtcttctatctggttactgtattattattagaaagagtgaagaacactacgtcagatccaattcaggcatcatcatagatcgtacagccccgcgcatttcaagtatagtcaagtcacaccgcaaaagtgccaacttgatattctgccggcaattatgctctccaccagtggaaagttgaaaagtacgagcggtataccgatctcggaaggcggtccatccagggccccataagtccagtacaaaccggtgctatggggccggctaagcaagagccacgtactccatgcctatcatagtaagtgtgtctaagtacgtgtacgccgtacatgctacacatattaccctggtcaatgcatgtctactccgtaccagatacctaaataatcatatgtagactacgaacacaattaatatcaatttatcccaaagagtaattcgccgttttttcgcgcccacatcccgcttatgataagcacggccggcgatctgcgaaatgcttgtacatagtactttacttttcaagtcccaggctccagcccaccgagtctcacatcggctaatcttagaacccaaaaaacggagaatcggccgatcttatcggagggcacatcggaggacacatactgagataggcacccgagttaaaagttagcgatacggatacaacgtggtgaaccgtaggttatccggtggattcgccctccggtcgtgttggcgtaccagagcttagcggggtccgggtggggggtctgtcaaggtcccatggaaacgcgtgataattcgttgttatttgtgcaactgataaatttagccgcggtttgattggcccggtgttctgatgtttcaccaggcatctgcatactgtatccattgcataccctatctatcgagtgctacattggaatatataacatacagagggaataccactccaaatgaggcccataatggaggggcaaggacacacttctaatcgcattgtgcacggccccggcgtgtggcaggtggcggttcacttggcaaatcggtgccaattcctacctcgagtgtggccacgcggtggccaagtcgtggccaaggcgtccgaggctggttctttgtttcatggattggattgattgaatcggccgcgtgagagatagcgtcataaataaatcgggatccaagggcctatgtgtgtacggagtattccccgccacatgggtgcatatgtggcggggagcgaaatacatacaattggagattatgatacatttgtattgctatgtacatacattattataccaagatcaatctggaatagtgccgttgtagtcaaactctgctccatcactgctaactgcataatgcctaggcagagaagtcgggactagagcacatgccaactaccactagcctcccgaggtcgagaaaggtacggtcgaggacatgcctaaataggactagtgcagtacacggtgctcacgttggcgtggggattttccccacggtaatttatttacggtacggtgacgagtcctcaaagttaattattttagcgacattcatggcgccaagggaagcaattgcagttatatataaacgacgtagttgtgtatactgtatatccaatatatcctacacatataattgagccaattcacatccgacggaaataatcaatccaactcaggaatacacagtactgtaagttgaaatatccataaataaattaaaaggttaatcaattccccttaattgccccatggccaacgcgccaatcacatcccctcccagccgctcaatcttggaaccacagccacccctctcgtgctcagcctcgtaatgttctcaacaccttttgtcccttccccgtattactttcccttcacctcccaatcctttttttcctttttcgcctccaatttcgatttttaaacgctgagggtctctcctttccctctttagcttttagtctccccactccccgtcactccttattatcgaactagcctcccctttctttaaatactcttttctccctcctttgtctattaccatcttatgacttgcatttcccgtactttgacctaactacggcctgaggggtatgtgaaacaaccttaatacgaccctaacgactacccttttggggcttcaattggctatcgcgcttctcctattcgatccttaaaccttcaccatgcggcgcggtctcgttatcttccttctcgtcaacctcatcatcctctccttgctcgtccggagtgtctcgaccctactggcactactagtcgaggatgccgcggccgacgccatccaccgcgcggagctgccctcgccaaattccagcctgatcgagcatcgcccccagatcattccaaagatcattcaccaaacatacaagaatgagaccatcccagaggtctgggtaggagctcagcagagttgcattgacttgcacccggactatgaatatattgtacgtgcatgccctttgatccgtcggatccaagctgaccctctgtcattagctctggacaaacgaaaagtcgcgagagttcattgccgccgaatacccctggttcttggacacattcgatggctacagttaccctattcaacgcgccgatactatccgatacttcattctcgcgcactacggtggaacatacattgacctggacgacgtaagtatacctacccggaagaccatggtattccattctaacatcaaacagggctgcaaccgtcgcttggatcctctcctggcttatcccgcctgggtacgccgtacggccccaaccggtatctccaatgatgccatgggctcagtaccccagcacccattcttcctccgtaccatcgaagagctgcaaaagtacgatcgtcactggctcctcccctacatcacggtcatgtactcaaccggaccgttgttcttgtcggtcatctggaaagagtacatgcgcgatgggccgagcgaagctgggcgcgtgcgcatcctcatgcaggatgagtacaacaaattctcttggagcttcttcacccaccaccggggtaacagctggcacggcaaggatgcgcatctgatcttctgggtaagtgacagtctgatattattatcgaacaatgctaatctctcacagatgggtgaacactgggtcttcctcactatctgcggcttcctccttgctggaatcgtcgggttctgcctctggtggagctacggacgtgtcatgctcctaggagccaagtaccgctaccgctactccaaagtatcaggcatcccaccgcgactctcgacgtcgccaacacgccgctcgcgactttcagtcccgaccctcctgcgacgggtcagcttcaaagaagacgaagagtccggcggggtcacagagacctcgtacgaactcgaacgtcgcgatgactagagatctagagattacttctcaactcgcaacttgccattttacagcctgtgtatttgtctgtaacgacacggccggatatgatctctgcatcagcatttattgtacaacttttgctctttctttctgtgtttaggagcgcgttatgcatggtgtctcaatcctgtgacgggatcctggattgaatgctcacctggagcacttgggtttgcttttggacatgtgcgagaccttgtctatcactcggttccatttcactgtcccccttttttttttctgtctattgatttgtaaacaacttggattcgcttctcgggagacagtggaatatatggacatgcctctatgccggattcggatatctccggaaaaatgatgactcgaaatactttggactattccaagtataaaatttaagtatagcactagaacagtccgtgcaatcatgtcttgaaacctcaacccgcaatcctgaaaccctaagttctccaatgacaacaccgtgccttgaatcgccacctctaagcttttcaggtgaacctatcacgtctgggcttggacatttttttaaaaatagtgtactatgtaacacgtccattgtttgagcatcccatttttggtgttttccttgatctaactaacatacttcagtccacatctcgcattctccgcgtctaccctacaatgtactccctccgcctcccctttgtatgtcccagctgcctcggacaatgcaagcccttctttcatgcctgacatgttcgaggacttataaagataatctgctgtgctgctctctacacagcaccaacatcatttctatatcatcctataacagccatccatctgactcttgactttgacattcaatccctacacgatatcgccgttcttctttactactataacctcaaaaatgcacctccaaaccctcctcctcactctaaccctaaccctcaccatccaaacaaccgcaacacccctcccaaccaccctcttcacccgcaaccgcaacaacgcagccctaaccgaatcccaactcgtcaccatcgccccctcctcgaaatcctgcaccgacgccccagcagcaggcgaatgcgccacggcaaaacaagccgcaaagttcacctcccagtccttcgacacgtacaaagtaacctcgaaagccgagcaagccgccgtaatcagcctgatggcgttcgaaagcggcgatttcaaatataataagaatcatttcccgggtgttgctgggcagggtagtgagttttatctgtctaaccttacatctaacataaatactaaccatatccttcagcacggaacatgcaatccccatccttcaacaagaaatacgccgcgtccctgcctgcactcaaagataaactcgctaccgttaacggtcccgctgagctccttgatctcttgcgcaacgacggtgcgacggacttcggctctggtgcttggttcttgaccacgcagtgctcgaaggaggtgcgggctgcgctggctgatggttctgagactgggtggcagcggtttatctctgattgtgtggggacttcggttacggatgagaggaaggagtattgggagagggctgttaaggctattggtgtttagattgtggttggtttgatttgtggctcggagctggttcttcgctgttgactgtgttgagtcttgactgtgcttatgatgattatggattatgggaataggaatggcatagaatataaatgaagttcttttcatggcacctctataatggtactaagtaacagtaacagtagaccaccttgtacggagtacatctatctcattcatctcattcattacacaattttaatatccaaactacaaaacacccttggtactaacaacatcacccgcaccaacatcacccgcaaccctacgcttacaggccgtgcgaatagcaacagcaagcgccttgaacgcactctccgcgcggtggtggtcattatcaccataagtgcaaccaacatgcagcgtcacgcccgctgcctgcgcaaagctctgcagaccatgcgtgatcatctccgtgctcaagtcgccgatcttctcgcgccggaagccaaggttgataaccgcccacggccgactggagaggtcaatgaccgcccacgagagcgcctcgtcgagaggcgcgtcgccgcggccgaatcgctcgagggattgtcgtgcgccgagtgctgctgtgaaggcttcgcctagtgcgaggaaggtgtcttctgttgtgtggtggtcgtcgactggggatttgttagcattgccattgtcattatcattccatattgtagtatagtatcctgtgtatgaactcactgtataaatcacccttcgcccgaactgcaagactcatcccgccgtgcttcgccagcgcgtgcagcatgtggtccaggaacccgatgcccgtgctgatggtgatctgctgcgtcggggtgaattgcgtcgcatggccggcgtccttgggtggcacgatgcctttcttggaggcctcggcttctttggggtctgttggggcggggaagtgggctgatggttcgtagggtgggaggacgccgccgtctagcgagagcgagatttggattttggtctcgttggtggaccgggagatggtcgctgtgcgcgccgggagcgacattgtgggtttagggatttggtgtagggcgaattggcaaattggagagagtcggtgtttggtagatgcccaggtgggagataatcggatttcttttttgtctgactcgttcgcgggagaatcgttgatccgcgcttcagtatggagggaatggacgacctgaggttggcaggtttatgacactggctggtccaggtttttattctgactttctggagatcgatgattctttatattgtcttcgggatttgaaacacatatcttcttcggcattgtctactttgctttactttgtttatcgtcgcactcggcctcgataagaccgactcccatctaaattcattccctctgggccgtacacttacaacggacataccagaatgccaccaccatctaaccacaggggcgatgtcgaacccccagaagaaatcacctgggtagccgcccaaggcttcctgaccggcgcgctccgcgtaagcaaccggacctccaattcgtctctccgtgaactcccagagcaatcactaataccctcaagtttggctccgtgtccatcttggctcatatgattcttatcctgccccaccccttcgtcttctccgcgccaagtccacccgtcgcatatgccccgacacaaccccgtccacgccctaacatattctcccgcgactacctccgctcacgactcttccaccgccccatagagggcttctcaagctggatatccccggggtcccgtgtctaccgtggtctgacgccgcagttcaaggtctttttgcaggtcgtggctatgacgctgggtggttgtatctggcaggagaaacgcgtgaccgagtatatcgagctgctgagacggattaaacgcacggagcgactggaggctgaacgtgcggaagggcatcgtcggtaatcttatatgttgtaaagatttggagacatccactaggttttgcaacgatgtagacttggtttggatggaacttggaacgtgaactttccaccggacacaatacatccgccgcttgggcggaactcggatgagctgaatctcatttctcggtcgttttccaaacctgcacggtctcacaggattgaggcgaatactttgtagccctcgtcagagttactcaccgtaggccgacggaggattgaacatgatcacgtggcgcggtcttggacaaccagacaaatgagcgtagggaacttgtgcattctatagaaaatctagattgctcttgaaagcctgtaaaagccacatgcgcaatgttgaaagtaagtcgaccttgctatcaccagtcagagcgtattgcatgacctcttcagagtcaggctatgtatcttgatttatcgcttctagctcgtcatcttcgctcggtctgtttctactgcgcattgctcttctaccgtagaacacccagcttagttggggttccgaacagattaggatgactctagccttcccagactcgtagcaggtgtagacccttgttagggcacaagccggacaaatagggaatcacccagccccagaaggctctgggcccgaaatccgggaataatcgaagccacccggttctacgcggatgaacatggtgaggatgaccagtacaaactacatcatgagcatcccgggtcgttcgggctgtcatatgtcgaataccaagctcaattattacggggtattgaatgattccacctagcaaggcagccaatgtactaatgtgaactatcaaccgtctaatagttatacgctgtatgactgggctgttgtagggccgaactatactagctttagaaagatgatgtccgtaggcttggcctccgatgctctagtacatctctagtacgaagagcacgtaagaggcgctgcactaggcttgatagtgccgatatagtcggaactacagggattgattgcattagactaattggactcctcgacatattgattggtctttgtactccagaacaaccctgaaagctacgtttgtacggagtatgaactataccccgtcctccggtcatcgttcatcgttcatccccctatacgatctacactcaattgacaacatagcatcataggttcaatctccggatccacccctaaaggaatgatcggcgactatggcactccacgatactgcttccgaaggggtattaatctctcgggcccacgtgaaagggagatcacaatggcaatcaggggggatatccccagacaccttggcgtcatcggtgacgaagttcattcagatcagcggttgtaaggttcactatcaggtcggatgccatgttgtttgggttgatgcctggattatgcctgatccagaccgctttcgacactgtatgtagatatcattggaattgaagctattcccactctaaaagtctctatattcacccattccctgccattgaatctatctgtctatttcaaaggtcctagggttaggtactttgcttgtatggtctctatcaagtaatccaggttctattttctgccggctcaacaggctggtccaggcatcgacacctcaaacctcaggcatccaagtttccccccttcgcacggccttctgacggtccttttcggcgccacctcagatttcaagatataaataagcgatctctgaaagtaaaagaagaagataaattaaaaaataaattaaaaaccctagagaagaaaaaaaagccacaactgaaacatctccagttgatacagttggacctgactgcatccgtccatcctcgattccctctatttcctcctttttccatcttttccgactatccctctagtggattctgctgttttcatttgacgcattcaatttggcctccttcttatgtgaagatatcaaatcacattagatcctgtgcatattgtggattccccccttccgcaaccatcaccgcattcaacattgttgacaggttcctgttgtctgcgcttagatatagggaacagtttcccatcttagcaattgtatgctaattgcttctcatggcgctgtgacgatctatagtatgtgctaccttccccctcatttgctccgctccctccctcctcgcgttattcccccgtcatgacccttcacacggctaattgatccctagtacgaacgacgttgaggtcgtcgagataagcttcctttctcagtacctagcactcgcgctactcttccaccttacgcaactccccctgcttctgtaccactagtccgccctaccgcaccagacatggctgaaatgatcggcaaacgacaacgaagaaagagcctgagcgtgttcagtccatccctcacactatcaacccccctccgacctgcgatccacacccgaacaccctcggatgataccttgacccgggataagaaaggccggcggaattctagcttcttcggccggtctcatagtccgaacagagcgtccgatggatcgaataaccgccgccctgggacggcaggctccgacacccccgtcggcataccatccacaccggtcatggaaacccctcgtccgcggaggaagtcgatgcagaagaagcgcacctcggtttttggttctctgaggtcattgcactcatgggaagacgatgaaacgatgagtccgtccgtcggctcgatgatggacgagcaaagcatggccactccccgaaatgggatctggtcatctgcaatcctccaccacggggaagttcagacgactggaggcatgtggaggaagaagagtcattacttggtcctgacggatacccacctcattcgctttaagaatcaaggcaaagccgccgatgtctttgcttgtattcccgcttcttatacccgacctgcgccttcccatcgccaatcggtggcttcagtcagttctctgcaggatatgcaattcatggcctctggcgattcaactgccggaatcccactaaacagcataatcgcagtctacatgttggaagatgcacgattgtcaccatcggtcgaagtggcctatctcgacgagcgcacaaacaaagccacattggtgcaaatgcagacatctgatttgcaagaattaaacctttggatggtgggcatccgtcaagccgcgcagatggctagagcaaattgtccaatgccatttagcaagggatcgattgagtatgtaacccgtatgcttgagcacgagcgagattacgacccagaggtgttccgcatgttccgtgtcattcaaatcgcgtccagcaagtcaatcacccgctcttcctcggatgacctgacgaagctgtcgcccacgggctgctatctcgccattggcgcacataagctgcatctgctgcccatgcagaagaccaccaatcgatcatcggtcgtatctctgtcagactgggaggccggtacttcatttggtctgatgaacctgactggtttgtcgatggagtacggtgacgacagcctgcatctgatctttaggattcctctcaagaaatcattcaatgtctttttggcctctgttcattccgttgaaatcgcatgttggatccgacaacacactgaataccttcgcccattgtgggtacgacagccatacgaattcgtggttccgaaagaactgcaaaatgacgacaatttcccgcctgttgctttagatgaagattatggatgcttcgaccgaaccttggtcgcctactctgccagttatgacatcgacacatcaaatatacgatatacaatcgaccaggaatgcgaggatgctccatgcttccgtctgctgaagcctgcttccccgaaaaccccgcggtacaacgctttagagctcattgctgtcatgcgcgcacttcgctataatgaattcttccggtcaatctcgttccgcggggtcaatctggatgcattgcagggccttcgtgatattcatggggtggactccgacgtccatctcgaccgaggaggcgcctccgtgcatattccaggccagacaaatctaactgtcctctcgcaagaggtgcgagctttagctctgaagagcaaatggcttcgccgactcgacttctcttactgccttacaaggatcccgacaccaactctggacaagggtactcgtgatccaggctgtgggattccagaagcgatcttccccgtctgtcgccgagaactgactagcgtggactgggttgtgcttaacggtatcaagctaggtgagtccgatttggactatcttgtcgatgcggcttcgcaaaggcgtagtcacctgcgcgctctagaagttggagactgtgggttatccgtgcatgacctagatcttcttctgtcgactatcgtcgcacaagaatcgacacttgaggcgatcaacatatcaggcgtgcagggccgattgaatcccgatgtcctccagcaatacattggctattttggacaaatccgcaaaatcaacttatctcgcatatcacggacctctggcactgaccctctcatcacggccgaaatgctgttcaactggcgactcgaagagctggctctcagtcggacggttttgaatcgcgagaccgtggatgccattgctacttacctggctagcgatcgctctcgaaaccttcgtgtgcttcgtcttgatcagtgtggtctgaccggagaggatgtggctatgttcatgcagtcgatgtctagtgaacctgattccccgcgcagtctccatctgcatgtcaatgagaaacgcattgacaacggctgttctcacgttttcaatgctattgcgaacaatcagaccccttcgcatctgtcaatgcgtatgattgatttcaagaaagaagaccatttccgtgagctggtggattcacttcgaaagaacagcactctcaaatttttggatatttcaaaggcttccctcccatacgatgctagtcctgagacttgccgatcgttgcaagtgatgctggaggagaatgagacgcttgaggctttggacattagcggtgacaacgcgcaccttgatgttgcacgcttcggcattggtcttaatcttgcactgactggcctgaagaagaacacatctctaaaggtcctgagaattgaacaccagaaactcggtcttcaaggtgcaaataccctagcctccgtcttagaggagaatgatacactacgtgaagtacattgtgagaacaatgatatcaatctgcagtcctttacggtcttggttaacggccttcggtgcaaccgctcccttctcaccctctcctgcatggatcgggaccgagtcctgtccctggacaaagtacgtcgagaggttgataatgtccgatgggaggctagcaacggcaaccaaagttccggccactcggtccgtcgttctctatatgcagcgatgaccgttggccaaggggggcaagggcacagactgagcaaagcgccgccacctagtgtcgcctcggcattggaaaactctccattcgccaaccataacgttgaactagtcttgcagtctctgaacgagagatgggacaccgaagtctctcggctcaatcgatatctcctccgtaactacaacattgcccatgggattgaggaaattgatgatgattccgccagcattggacgacccgcaacagcggcgagcctgagcacgatgtttgacaatttcaaattcgacgtgtccgtgtcggcagatgagattcgaacgccgtcgctgctagacgagcctcctgctgtcatccgactttcagaggcatccgacaccccatcccagtcctcgtcgtacatcgagtccacctccttccaaacaagacgcatttcatccaatacacgtcgccctcataccgccgctgctgcacacttcactccatccagtcatagttcttcggcctctctcctagctctcccggttccagccgtgcccccagcagttaagaaagcagagagcgtgcgcagtggacgcagttcttccagtactgcctcgttcagcgccggcagtacacgaagcgcatatggcgtcgcctcgtctaccctaagaggcttcctcagcggcaccgcgttgagggaacgtcgccgtgcggatgcagtgcgcccctcacctgtttgtgtcagcgacgacaagccgcctcagctagactggacacctccgaagcttgacttgggaggtctctagagccttccttacaccctcaccctcaccaacacaactacctgtacagaatcctccacacctcacccaacacgaaccgaaacgaagcctggctcggtatatatacgacgaaccacacccaggtttcgctgatatacccttccctgtgaaacatttttatcttattaactcataactcataaatcaacccaaccccatccgaattcccatttctccaaaccggccagttggcactgataccctggcgttgcatttttttttacaagaccgcattctccgggcgttccatattcatttcctcatttccattctcattctgtgccaacatcttcctattcatcttatcgtgtccttgacattttgttctttgttttattgctcttattggaaagcgtcctcattttgtgggttagtgacgctcatgcgtgaatccatggctaatgtttattgggtctggggcttgggctgtttgatattttattgtgttgttttctatgcggttgttcctctctagagcgaggattgaatactgtttggataggcatgaaacactattgttcctttctgtttgatttcctagtctcgaagactgagtagtttaagtgaattggaggctataaaacacaaccatttctatatatgcataaaattgataaacatcccacgaaaacgcgttcaatctatataaaaagcaacgccacggatgtatatctaagcccaatcgaaatacaatacaaatgggagaagattaaatctgatactatacaaaacggattcccatctcaccacctccaagtatcctctcccagatacctagtcgaacctcacatatcacaagaatctttataaacaagaagcccacgctcacgatccttctgatccatcttcttccgccaaacacgtcctttctcagtgatctttttcaaaatcgcgaagaaaccagcatcatgatcctgcacgttcttcttcaacgccacattgcgacgatgcttgatcgcagccagaatatggttgctctcttccacactgagctcgttgagctcgtagtcaatcgtccacctgtcggacgccgtgaaccacgtcggccgctgcaccggaacgccattcaccttgttgttcacgatgagcgtcatgcctagaatgtcctcgtcgaagtcgccgatgtgggggggggtgcgtctgggtacgctcttggttggtttcgggcgtttgggttcggcgggcagctcgaacaggggcttgtattctaatgcctcggcttcggcttcttcggctttggcgtcggattcttcctcgccggcctctttcgggaagagctcgtcggccagggattctactgggggagcgtcctgtagatttgattccgtcgagtccacctctgaataggtaggttcgggttcgagtgactcctctcctgggaacaggaagtccttttcgactgactcctcttctggatagaggggttcgtcttcgtcggcctccacggctgtctctgggatatggccgtcgatgtattggtctgggttgagaatgcggtcctggatggcgtcgatgtgggctttgttctttgtctgaatggcctcgatttgctcgtccgtgacgggctgcgcgacgatcaacatgtagggggggttaccctcgcgggcctcgaagtggaaacgcagggacttcttggggaacttcttcgtggccttgtccaggatcttctcccacaggccgagacttagttcgaattctttgtcgccaaggcaggtgttaggcgtgccgtgcaaagcctgatccatctcgtcgagagggatgtattggaagccgaagatgcgctcgatgttgtgatacgcgacaaagatgccgtccatgcggccaacgcgcacctgcagggaatacttgaggaaggcggcgcggatcatatcgaagtattcgcgttcgtaagactcccacttgccatagcggcgtcggatctcgtagcccatcccgcgctcgtgctccgtggattccatgcggattgaaactaccgcacgggttttcaagtcgaacatgccagtgcctggaagtctgggatcgtaggcgtcgagctgcgatcgcatgaggaatttgccgagggtgctgtagtggtaggactccggagtgtttgcttcttcctcggcagtgatcttgttcgcatcactgcggcggtagcgctcaaactgatcctttggcatcgtgagttgcttctccattgacttgcccagattcataagaatattagcgtggtcgtattccttgtccgcatcaatggcgtaaatatcctcctcttccttataacggaggaacatagcagtcggcgctcgaaggagacgggtgaacgtcctcagagggtcatcgaaaccccgactaattttgctagtatcgacaggccgccacgcggacagaagataatggaaatgagcgagaactgaagtcatgctcgatgacgagccgtagtacttcttcttatttttcttggtgatttcgcaagctgtctcatcttgtgaggaggtgatatatggcttcaaggcactgaagtcaaattccgtcacgggcatgatctggtccaggtaggggtcgaaattgaagactaaagaccgagggtcacgtagctggtagacaccaggactgtctgcttttagtatatcgatcattggtaggagacttagcaactcacttgaaaagcactcggtcgagaccaaaggcgacgcgtgggacaggaggcacggagacacgcacctcttgggtggaagattagctcacattcgacagctatatcagttccaaactcaccttttaggctctgctccgttgagtcaacagacccgcaatctttagacataacgtggtttttgatgaaatcaaggacttcgtcattgtccctgaattctggcctatccgaccacggggtgggtgctggaatatccaccttctgcctgggtgctggtttgtccgccttctgcgtgggtgttggctcattcgaacttgcaataccgttcttagagctggcgtccaatatttgggcaactacattgctagtggacttcaaatcgagcgtgctcttgctgggttcactgagcgctggcgtatctgctggtccgtctgtcgtaatcttagcattggctaagcgttttctctccttggccttggcccttctttcttgtcgtttggcatgtatatccgctgtccgcaaggccttgactttgtctgcttccaccagtgctgcttctatcgatactgcacccgacgtggcggcctctcgctgtgctgctctcgcccgcctcagttccaacttgtatgctgcccagaatgaaaggtctctcccggctataagtgactgctggaactctctgaaggccgggtaatgccgctgtttgtaattgctcttttgtgtggcagacatcccataccatattagagcagtgagctctctcggtttaggttgcaatggcgcgggtttttgaggtttggaagaggcggcatctttcgtgtcttggatctggccctatagcacactctgtcaaaactcatctcacgttgtacttcggatcgaaggacatacattgggcgctagcggcactgaaggttcggtcgacgcgtcaattgaatcggtcttcggctctatttcacctgaattggtacggagtgcagatatgcggtgaaactggcgcaaaccgagcgcgccagggcgcggcagacaagagagacagacatgtcgacttaaagggcctgacacagaccgcaaagaagtccgaagcattcaggtcaaatatcgacagttaatctgggaaagggtatagaaatgtagaagtccccaaatgttgtcgactcaagaattctagaataaaaaaaaaaactccgtcaataagccaccgggctaacctcagaattgcctctccggttttttttctgccaggagattgggggtcaccgctttgctgttatctcgttgccttggtgcctttctgcctttctgcctaaggtgtcaatattttatatcggggagaaatagaatagtgcgaacgatgagacgacagtaggaggtttggatgtaggttttgttttgttttttatatgcttcatattcaatcgggctataatatgattaaatgactacaaaatccatgtttcttagacttatattgtacaacatacaagagttatacattcgcaattgtatagaatcctgcactcttatcccttaacactaaatgaaagacatataaaatcagtcttgaactgtcaaatttgaactgtcaaatccagtaatccatcttctaattagaactatagaatattttatctcaccggccgagatcgctgggtagaattctggggtcggagaaacacccagccggagggcagaaaaaaagttgtgaaagtttaacatcttcgaacttcccattcccgcatacaaccttggaagttgcttctcaggtctctgtgaggtgagcaagtgtggattctcttatgatcaagtctttcccaactgtgtgccctgttccattgctcaatgactcggtttcccttgactgaggggcactaaataccccgcggagttcctatactaattgctaacaccaccacagtcgagacgcttctccaaccatggcctccgaacaattgcgcatccttattgtcggcaatggtggccgtgagcatgcctacgcctggaagctgagcgagtcccccttggtcgacattgtctatgtcgctcccggaaacggtggcacaggcctgggtaccaacagcaagatcaccaatgccaatgtcaagggcgacgactaccccggcctcgtggctttcgcacagaagaaccaggtgaacctcgtggtaccaggtcccgaggcacctctcgttgatggcatccagggttatttccaggctggtgagtcacctttttcttttttttttttttttcttttttttcggttgtttttttcctgcataccaatcgctttgaacaattctaaaaatgcctcacaaaaatagtcggtattcgatgcttcggtccctccaaggctgctgcccgcatggagggctccaagaccttctccaaggacttcatgcagcgccatcagatccccaccgccgagttcggaaacttctctgactacgagtctgcacgtcgctacctcgactccgtgtcgcacaacgtggtgatcaaggctgatggtctggctggtggtaagggtgtgatcatccccactaccaaagaggaagcccacaaggccttgaaggaaatgatgttggaccaccagttcggcaaggctggcgatgaggtcgtgattgaggagtacttggagggtgatgagctgagtatcctcactttcagtgacggttatactattcgctcgcttcctccagcgcaggaccacaagcgcatcttcgatggtgaccatggccccaacactggtggcatgggctgctatgcgcccacgcgcattgcgccgaaagaagttgtggatgagattgaccggaccatcattcagccttccgttgacggaatgcgaaaggatggtacgtttgatcgaaaatgcctttcccaaagcatgttcctaatcattgtctaggtttccccttcgttggtatattgtttaccggtcttatgatgaccaagaacggacccaaggtccttgaatacaacgtccgcggtggagacccagagacccaaactctgctacctctactcagcaaggacaccgatcttgcacagatcatggtggcctgtgccgaccactggctggacggtgtctcgatcaagatcgagcccaacttctccaccaccgttattgctgtcgccggcggctaccccaacgcttatgccaagggcaagaccatcactctggcccccgcacccgctggaaccctcatcttccacgccggcacaactctttctggcaacgagttgcaaacctctgggggccgtgtcatcgcctccacggccaccgccgcgacccttgaggaggctgttgctaagagttatgcaggcatcaagaccatcagctttgaggacatgttctaccgcaaggacattgcccaccgcgcgttccgccagaccgctaacacctcgctcacctacgcccaggccggtgtctctatcgatgccggcaacgagctcgtcaaccagatcaagagctccgtccgccgcaccaaacgccctggcactgacgccgtcatcggcggcttcggcggcctcttctctctacccgctgccaactccgcctaccaccctcactcgcccaccctaatcggagccattgacggagtcggcaccaagctcaagatcgcccacgcaattggtatccacgacaccgtcggcatcgacctcgtcgccatgaacgtcaacgaccttgtcgtccaaggtgccgagcccctcttcttcctggactgctactcctgcggtcaccttgacgtgcccaccgctgcggccttcgtcaccggtgttgccgagggctgtgtccaagccggctgcgccctgatcggcggcgagaccgctgagatgcccggcctcttcgtcgacgactcctacgacgccgtcggagccgccgtcggcgctatcaacaccacgggcgacaacgctcgtgccatcctcccgcacacagaaaacatgcgctctggcgatgtccttctcgccctcggctcgtccggcccccactccaacggctactctctcgtccggaagatcgtcgagcgtgccggcctgagctacaccgacaccgcacctttctccatgcccggcctcgacgccggcgtctccgtcggccgtgccctcctcacccctacccgcatctacgtcaaatccatcctcggcgcactcaacacccacggctctgccattaagggtctggcccacattaccggcggtggtctcaccgagaacattccccgtatgctccccgacaccctcactgcgcaggtcgacgtcagcacctgggcccagccttccgtcttcacttggctccagcgtgccggtaacgtctcctctgccgagatggctcgtgccttcaactgcggtgttggtatgatcattgccgtcgaccccgcccacgaggctgctatccgtcagaccttcgaggctgctggtgagtctgtgtaccgcgttggtgagctgcgtgctcgtgccaagggcgaagagggctgtgtgctgtctggacttgagtcttggtctgcgtaatattcacgatcctgacgttaaaatttgatattgatggtgatgttgatgcgtgatgctttttatatatggatggagaaaatgatttgcctgggttatctacatatcttatagatttttttgttactgtttatttttctggttcttcgtattccccgtctttcttctctgccttttataatataggacttttggatgagtcccgaactaatggattttcctacgtgcatgagagtatatatattggaaaaaaagtcattgatctatatatccaagatttctgtattgttcctattcccagcatatctgattgaatgcctgaaaatatatatatcggcgataaaggtctgatgtaaaaaggctaaaacaacgatgctcgaaagtcagtaatgcataatagacaccacgattcaacaagcgctaaatctctcaatagcatttatagaatacaaaaaaccagtggatggaatattcgaagtcagagttatgttaaaactacggacaaaatcgggcaatttagctgaagacaggctagaacaagacggacgatggagacgtcaagagaaaaggaaaacccaacctattccccatagccaaccaactccatatgcatcctcaccctacaggtacactgttgtcgccccagcgccagaaactcgtccagtcaaacaatcagagaggcggacgggacagcgcattcgaatgaagaaaagaaatggagggtaatggtaaaatgtttcaaagcagagatggatggataggaagatcgaggtaaagagtaaggtaaagagtaacaaaaaaaaacgatcgactctattccactaaaatcgagattccattttcaggctatccgcttgataatgcgagtccaacaacgcttgcaatccaccagtgcctccatcctgctttttgatacaccaggaaagtacgagtgaatacgagtagaaaagtgcaacaagaagcttagaagcacttgcggtggacgatggaaggaccgctctcgtcgtactcctgcttcgagatccacatctgctggaaggtcgacagggaggccaggatggatccaccgatccagacggagtacttgcgctcggggggagcaatgatcttgaccttcatggaagaaggagcaagagcagtgatctccttctgcatacggtcggagataccggggtacatggtggtaccaccagactaaaagtgtgttagtgggatgttgcaagttcaaccggggagaccttttcttaccatgacaatgttaccgtacagatccttacggacatcaacatcacacttcatgatagagttgaaggtggtgacgtggataccgccagactcaagaccaagaacgtttggctggaacagagcctcgggagcgcggaagcgctcgttaccgatagtgataacctgtccatcaggaagctcgtaggacttctcgaggctggagctctgggaagcggtctggatctcctgctcgaagtcgagagcaacgtagcaaagcttctccttgatgtcacggacgatttcgcgctcggcagtggtggagaaagtgtaaccacgctcagcgaggatcttcatcaggtagtcggtcaaatcacggccagccatgtcgacacgcgagatagcgtggggcagagagaaaccctcgtagatggggacgacgtgggtaacaccgtcaccggagtcgagaacgataccagtggtacgaccggaggcgtacagggacagaacggcctggatggagacgtagaaggcgggtgcgttgaaggtctcgaacacgatctgggtcatcttctcacggttggacttggggttgataggagcttcggtcaagagaatggggtgctcttcgggggcaacgcggagctcgttgtagaaggtgtggtgccagatcttctccatatcgtcccagttggtgacaacaccgtgctcaatggggtaacggagtgtgaggataccacgcttggactgtgcctcatcaccaacgtaggagtccttctgacccataccaatcatgatactgcgcccatgttagtatatttttattcattgagaatcaaactggctgcatggcgtatgtgtccaaaagccaaaaagaaagggggggattatttacccatggtgacggggacgaccgacaatggaggctgttgaatttggtcagttatttgatcctcacattcaaggtttccagccaagcaaaagaggggaagccatccgacgcaagggttggtgggatggcggccttcgcaaaggaggggtgtcagattctgtggggttggacttacggaagacagctcgtggtgcgtcgtcaccggcgaaaccggccttgcacatacccgaactacatcgcaaatcatcagtatcataattcttgtagttttggaagcgccatctcgtaattgtggagggagatggaaagcgattgggatggattccatctgccgtcatgtgggcgaattaggggtggcaacgaccgcgaccgggctgatttggtgaccaggccgaaacacaagccagaagctcccgggaaaaagcatagcacatacccattgtcgataacgagagcagcaacttcttctataatgagatatccgggttagtggtcattcgcaaatgggattcgagctgtggcaacagggggcagcttcctgggaagctgctgatgtggccacatcagaataacataccctccattgtgacagattaaacaatgaacctaagggagagggggggatagaaaaagaaaagaaagatggaatgaggttagaggggggatatagttgggattaggggagaagggaagaaggaagagagtgagggagcgagaagagtggagaggggtttgtgatggctgggattgtgcgctgcctgaggccgtcgattctcttttgaccccctccgatctacaggttttggccgtttcttttatatttctgatatctacaagttcaggataaggcagaactattttcatctcattattgcactgtctcggacccctttcttgtctacctagagcattgcgtggacactcttaggggtgagcctccagacccctccggggaacacgtaccttgaccgggttaggcactctagagtgtttagttgtattacagttattacaatatcagacatgcgacaggcatatgattgtatatcgtactccgtacatacatgtaggctacgggattccctgtggcgtggatgttctaagtataggacagacccagacttcagtcattggggtactcccgttccaaggttatttcaagtggacacacacgcatatacggctgtataggggataaccccttagaccgtgagactctgacactgccagataatttacgtcctcaggttgttaccgctacttcaccccaggcctaaggtgacaactaagcctgttgtaatagtgagcggtgaggtggtgccacgtgacatcttgggaagtacgagatgtacaccttcttttctccctgactacccctgactttgtctccttatttgcggagtaggtatctcctgatttatacatcaaagtactattttggaaaaccagcctatgctgaccatctccatggcagaaaacttggcatttgacccctccatcggcaataaagtcgctgaactttaagccccttggaatatatcttggcagcagaccaggctttgataaccgggttctagtacattccgaggcacgttgataaaccggaaaaaccatggccgagtagttctattgacatgcagccaatccgcagcacaagtgtttgattattcatctactctcactgcttactttcattgctctcccctcattgctcgaggaatatcgtttccgaaagcctgaagttcgctgtatcggaacaacgaactctacaagtgctctagtcggtctctatatatcgagtccgaaatggctaagctcaacggttcaagagaactactagtacgtagtaagaatgagccattagaaatcacattcatgccattcaaaccgccgaaacaagacttggtgataactcttttggctttcccaaggtcgttttagattttcctattcggtagccaagaagaaagaagacatcagtctctgcttcggctttctagtgacaactccgtgttgtgtgtagtcatgatgtagtctagttgggatgcgatcacatgatcgaacccgctggtcgtcgcgcgaatcacccagagccgtggccgagacgtcagattatgtcagcgggtcttttttctaactgtagaaaagagtattgatagaagaccgcggacaatactgtgcgataaacagcaattcaatttctgacttgcgtcatagactctattcatactctccttctttcctccctccccaaaccaatactacctaatcaccaacaaccaattaccccgccagcccaccatggaccccgaaatgaacaagctcctcaaatggagtgttgccaacacacagccagctgcaggcgccgatgacgagagcagcagtgcccaaagtcgcccagcagctgcgtcaaacctgaccccacaaatggtgaacacactattcggcggtccctccgaggccgacctgatgcgggccgcaatggaggtcgtacacgacgacgagtccgacctggagaacaagttgatcgcattcgacaacttcgagcagctgattgagggaattgacaatgccaacaacctcatcccgctcaatttatggaagccgcttgtcgagcttctccagcacgacgagactgaactcagacgtatggcggcctggtgtgtgggaacagccgtgcagaacaaccccaaggcgcaggatcatgtatgaaaactcccgattgacctacaagcatgttgaccaaatactgacacatccacagttcgtcgagctgaaccaaatgcctactctcgtcaatctcgccacgacagactcagaccccgcaacccgcaaaaaggccgtttacgctatctcctctgcggtccgtaaccaccagcctgccttggatgctctgcacaagagccttccagaaggctatcccaccgataagcgcgatgccgccgatatggaaggcattgatacgatcatcgatcagctgcggtctcacccgaccgaagcctccgcatgaatggagcgagttgtgactggactgaaagagtgaatacacaaaaatacagaggcagcagggtacccactgaatgcgagtccgttcttggaactggccttgtatcgtgccaagggctggggctcgcaatgcaacaggcaacatattatgttgctactgcaactgcgttgaatgctatgatgatgacgacgctaggcttcactgctggtaaatgcctgcgattatttgatttgcggatatccgaaatggttctgcaatggtttcttgttgcctaagagttgcatcaacatgaaacaacaacctgattttttgtggttcaagcatagatttgaattgtacataccccggggcttttgtcctacattgaatgcaatcacgagttccgacgatcaagaatgtcaaatcccgatgtttgaatctgtacctatgctgcctaaactggaccgtttcgttgtagcagtatgccctaaagaaccaaattcacactgtattgtagctcattaatgaaatatctcaagaaaagcagaaatgaattcatactccgaacaaattagagctcacgttgccttgactgatgatatccatagatatctcggaacaacatttctccaccagacatcgtcattggacttcagctctcaccagcaacatccccaaccaagacccccatcccccacaatcccaaaatggacagctcaagcaaccgactcttccgcttctccaagccagagtggctgaacaactccgccgtccgcaatggcggcgtctacgtggcaggcgcgctggtaagcatccgatccacctccggcctcacttgctcgtcgcagacaccccaagcccaaagccctcaactccaaatcaaaataaaacagaattgaacataacatctacctcaaacaaaaaaccaaaaacccaaagagctagaagctaacaaaaccacagttcgcagcaggcttcttcttcctaatcgacgtcgcggcattctcgcgcagcccgcgcaacggctcagacgtgcatatcaaattcgtcgactggatccccggtatctgctccgtgctgggaatgctggttatcaactcgattgagaagagccggctgcaggctgatagctttagttacagcgggagtggggttgcgtggaaggcgagatttgtgctgtttttgggattcgcgttgcttgctgggggattggctgggagtgtggtatgtatatctctttccccctcctactatactacgctttactgactcgcttgttcgtagacggttatggtcctcaagtacctcatcaaggattatccgatccagacgctctactttggaatcgcgaatattgtggctaatggccttgttatgctcaggtatgtgtcttgtctgatttgttattcgagttgtgcatgcgtgctaacaatgctattctcgatctagctctatcgtcctctgggtctctcagaacattgaagatgactacacctacaatctggcactgtgaggaggactgtttctatctataactggtctttgtgtattctactcgatttttgctctgatgactttttgctgggatgcattatgctttcacgtcttttggctgggattggcgctttagcatgaattcattcacattcctcaatgttttgcgtgttctcaagttaggagtccttattatgacagcctctgaaatatctagaataccatggtattctataagtaaacagtaaagtaaacattatcgagagaaaagtatcatttcagctatgcatcaagaaaccaaggcctaaaagaagcccccttgaacaccagatatgcattcataaaatcgtaaaaatcaccattacctcggaccctcaatgctcctcgcagaacaacctcagtaactcatcaatgcaagtcatagccttctccttcttcaagactgaaggcgccactcccggtgcctgcttcaagtacctgcggagcgcaaaagcagcagctttgtacgtcgcatggtacataaccttgaactcatcatcatccgaagtgatccccggtgccggggtttcagcccgcaaagcctccggcgccggcgtcgtgcccgagacatcaagttcaggctccgcacccgcaccacctggcggcttacccgacgcagagcgcatatccgcacggtggaatccatacagccgcatacaagtcaagacggtgcgcgtgatgagagtcttattatccgcaatcacagcatccggatccttagccggcgagcctggcgtggacgccggtttctcctcggagaccgaaagagatgacgggccctggccctgcgacatctgttctccacgtcgcgggccagaatccaagcacgggttcggagtaggcgcgcgcttttgtggatcggcattcagggctggcgttgtgcggccgcgtacgctacctgggcgatgtagacctgctccgatagagacggatctggaccggtgggagacgatccggtcgagagacgggagggtgggtccgtcttcttcgggctcgcgcttgatgcggagtgtttgtaggttctgggatgaggaaagaggtcgtgaaggtgccattagttgtgagacggcttcgccgcctcgctggcggacgcggcggtggtgctgtgcgactacttcgaagagcgttgctactcttttgcgtttggggctgggagagcttatgtctggtaggaactctgcgcagcgcgggttggcgatgggttggtccgggttggagggtggtggggatgggtaggcttgggcttgcgtgagtcgtgatgttgatagtggcacggcgtagattctgagttcatatggagcacgatgtggtctatttctgtgatctgggatctcggagggggatgaatgtggcggggtaggcgggcgtgtgcatgatgctgcgctggatagaacgccgtagactaataggcttgttgtggttgcgttgcctgatttggtgttgccttcgacgctgaccagcagacccactgggcattggaatgattgttggagtgctggatcttcttcgttcagccatagggcgcctgttagcttcctctggagccatcttgatgtccccgcgtgggatgtgtgtagttcgaggttaggaccggcgcgtgcatgcagtgggatgagtgctgggttcacgaagctacggagattgagctgggactccttggatagctcggactgtgagtaggaatttggatcgaccagtcgaatccctggtcaagtggttagcgaggaacaggatgcgatacgcgtatggcttaccttctaacttggagtccgagccgagaggaatggatcctgtccagacattcatcttgttaactggatcccgaaaaggcctttcatgggttcagcatagtgacatcaatctggtatagttgtgtcgtttctaaattgatctgctgttatctccgaatctctgcagacgcgccgagtccgcgcgcggtcacgtgtacaattaatagaccgaatatatcagtaaggtaaaaaggaagcagtaaaactaagtagatttggattcctcgtttttcagaagaattctctatatccattgcgttatagtacacctagagtagcacagccaggtgctggggccattgccatttaaagtgaggcacaccccacaccaaatcactcatacatagcatatcaagcatatcaagcgtacgctgaaatcaaagaaacagcagaaaatcagatgtcatcgtgaaggccggataccgtgagggccactgggatacagtagaagtatagcccttgaccccgcgcctcatccattctggacgatcagaactcctcctgttcctggaagaacatcgagaagctaataatggtgccatagatcaacaagcctccgaaaatcgacatgatcattgctgggatctcgattgcgccgctgtgggcgaggacgacaggaagtgctagacaggtcagttgataatcatcaatggcacaatgatgaggcattaaaatggacatagtgcggcctgaacatcaagaaccgaccggtcgagtgatgatatgtcccacaagaggggttgttgttaaccaacgacgtaccgataccagtaagaaccaagaatccggtcatgaaccgtccaaagtccatcgcagagttgctcgaactgtccataaaatcatctgggtttgcgcatcgttggcagatccagttgggaagcggcgcaacaacgtaaatgccgaccaccagcagcggccagtacctgtgccatagcgcggaagagaggataacgaggaggaaaccaattgcgagaacctggtcaaaagttagagaatattcagatgctaggcgaacagcgaaacgaagcatacaaaggacagggcgatgatggtcttgagtccagcggccatgattgcggagacgccgaaagccgatcgatgagattaaagatgggagacgcaggagccgttgaattaggtggatccaggagacgatattaagagcaggtcaacaatggcagccccattggctgagtgcgggaaatcaaagaaggacagtcgtgcgacaagctggagatgagctcgagaatgagtgacgttggcgcctgaaggtcactggatgttagcgcctgaggcaccaacagctcatgcttcacaccgcgtcactttactgcctgctccagctcccccatcctcctccatcaccggattatccctcggattcttacgtcgctgttcctgaatctctatttatcaacaataatccactttctctgtttgctttgatatccattcaacccttcccgccacgatgttcagaaacaattacgacaacgatgccgtcaccttgtaagaccaggtgctccctcggattcatcagatgctgactcaaaggatcctagctctccacagggtcggatatttcaagtggaatatgcacaggaagcagtgaagcaaggatccgtcgtcgtggggttggtgaataagacacatgccgtgctggttggactcaaggttcgcatacctacagcagagaacgaacagaccaaaccgtcaaaactaacatttggcatctagcgcaacgcagaagagctctcctcgtaccagaagaagatcatcgagatcgactcgcacatggcgatcgccatcgccggcctcgcatcagacgctcgcgtcctctcaaacttcatgaagcagcagtccctgggctcgaagatgacctacggtcggcccattcccttggaccgaatcgtcgcccagatcggcgaccgcgcgcagaccaacacccaacactacgggaaacgtccgtatggtgtgggtttgttggtggccggtgttgacgaggccggcccgcacttgttcgagttccagccctctgggctgacacacgagatgcttgcttgtgccatcggtgcccgttcgcagatggcacgtacgtatttggagcgtaatctcgacaagttcgaggactgcagtcgtgacgagctgatccaacatgggttgagcgcgctaaaggagacactgtctcaggataaggagcttacagtggacaatacttctgttggtgttgtcggtgtgactaatggcaagaaggagagcttcaagctgtacgagggccaggacacggctgtgctactggaggtgctggagcagcgtgagtccgctggtgcggagggcgagtccatggaggttgattcataaatgtctggtttgatttaatgattcgcatagacacgaaattttgataatgctttgtcttgtgtttgcgtccaatgatctcagttatccaatcatcaattcataaggctcttctcaacgaagtaatctatttgtatgcctgaagtctttcactgccgaaacccgaacaaatgcgaaacaaacccaaacaaacaaaacgacatctatatactggtaccccattgcttgatgatcaaacagagcagcttcattcctctccccagttcaactgcatccgccctgtgctgacccgataagccagcaacttcggccagacctcagagacctccttggcctccgcaaggatctctccattactagcactgatatacccctcttggacggcattgcgcacccaagccaacaagccatcccagtagccattgatattcaacaacacaaccgcaaccttatgaatgcccagttgattccacgtcgtcatctccataacctcctcaatagtgccaaacccaccagccagcgaaacaaacccagacccaggcccgccctcaaggaccttcgtggccatcagacgcttgcgcgtatgcatgtcggcgacaatggtcgtaatgccgtactcggactcggggattccaccggtatgaacagcatcagagtcgaccacccgctcggcagctttgccggcttgcttggcagtggactgggtttccatgtgctggcgcatgccgccgactgttgcgacttcgactagtgcacgtgggatgatgccgtgcacggatttcgggcccgagagcgagactagcgtgcgcgcaacttcgcccattaggcctgttgtgccgccgccgtagactagttgcacgttgttcttgtggaattcttcggcgagcgctcgcgctgcttccatgtgtactgggctgttgcctggtacggagccgcagctggaaacccgaggggggtttgttagtgtatagttcaagacatgaggtacacacgccagactggtagacgatacggtgtggttgtggcattgaaagtggtggtgaggggcacgactcacaatacacagacgacagcgggtttggtctccgagtccgccatgttggtatggtaattaggggctgagtgtatgaacaatgaagaggtcttggaagggcgttaattagagaagaaggaagagaacagcaagaggcaagaggcaacctgggaccaaacaggtaatcccccactccgataagagataacgtagtacacataacatagtataacgtcagggctccgactttgttcttcaaaggaccttttgatgtaagatttccaaataaatgcctctatatatgttatatattgcagctcgattttgtgttgtatgtttgcgagagtccagccactagttagtacaacttgaattaactgactagggcttgtgtacggctaaacaacacaacagctgggctttttatatcaacactaaacattcagtatgatacttataacaattttttggctatctaggttgtagggacatgaggctgtgatcggaataagctatatagtcacagatttatacttcttggtacctcaaaagccaactttatttaggtacactcgatagcttcaatattatgtcctcttctagttattgctattagtcaacttcatagtactataactaggtcaaaagaagtcgaattaatactctttgtttattctcttaatgctttttgagtccatgcagcaacttgagagtttgttccaccgatggagtataaattcacctaaaaggggattgttaagatcacaagagaaaattgattccattgttttccgttgccatggcttgaataaaggttgttcagtcctagagacttgttaaattgccatttttgtttcttatgttgagtatcatacatggaagcctatagaacaatttgctcttatagacaacttgattgttgcctgggtctatatataaccagtcacttgcccttgcaatacaggatgctcctcttcttttattgattgtcttatagtatactggctatttatatgtctatgcttatatatatgtctgtgttgaaatacgatttcatcaattctgtcaactctctccatcatccagggaaagcctcagttatatgaggtacctggaacaagttttcctagtgggaatatcggagtttccaccgtttctctcattcaagataaaggggcgacatggcgatacaaagtttgacggaccgatactgagtccctcacctggtttcacctttcaccacgacggcaaatgctgtggctccttctgtctgtcatactttaggagctgtctatttccacactgtgctgactgtgagccaatgattcggacatggaattcgtaggaagaaagaagctatcttccttgcttcctcatgctcaatcatcagcactgacttcaagacggtgtactcgtggaaggcatttatctttgccatcttcacactgctgccgtgggatatgttgatgtcgtcggacggcccttcgtgcttctggtgctcgcgtggcgcttgtgcgtgccgtcgagcaggatgtgaagtgtctttcccgttctgtcaaccaggcgaaaaaggctgccgcacttgcgctagagccgtctgcgacttctgaggcggaaaataccgcagcacccgcattgaaagagtctgtgacttccgaggaggagaagttttttgatgctcccacgcatgccgaagtttcttccacttctgtctcagacttacagaaatgcagctatgcttcacagacgcgcagtatacgcacttcttgatgatatcaaatcgggctttatcacaacgcagtgcccacaaggacagtgataaacagagcagactcattattcaagaccttggtacaccaagtatcaatttcgacactccattttcatctttggatatgcctggctctcccttctatcctttacatctttagctatgcgactactaggccacagagaaggcaccgaaaaagagaaagatgagctacagcagctaaatgattcgagagacaatgaattaaagctcagcgatcaggcaaagatatgtatgccaaactcggctgatagcccctagataccagtccctgtaaatgctatgcccagcacccaaacgcctagagatgcaaaaaaagggtatcaagtaaacaactcagctgacgatccgggccttcttcctcttccccttatcacttgtagagctaggcggcgaattgctcttatcggaagccttaccaggcgtctcgacgcggacctgtggcgtcgacgctctgacaggcagggtagaaggcgtactagtcggagccaaattagcagcggtcttcggcgcacccttaacagccgaggcggtagcctcgccgccagtccgtgataggatgaacgatcctggttcgccgacgagggggctctcgtccatgaattcgtcgccgtagcgcgtgagcaggctgaatgattcggctagactgcgcgtatcttgatatttggagcctgtagatgagccacccaggcctgatttactggttgattgggaggattcggtggctgggaaggatacgtctggcatgggtgttgcttctttgctctggggggcttggctggttccggcgggctctttgctgcggactcccggtggcaagtaggtgtgtccatgggaggcagtgaatgttggcaatgtcgcagcggatttcatgagctgggttagggatgtgacggctgatagctgcggggaaggattcattagaatacttgtctcggagcggttcgtgagttccgaggcaatacatacaattcgattccccacaacactcgcaaccgaaggggccatgtagatgcagtcgccgacaatgaagtatgtagctatcacggtcacctcgtcgtccatgccgctcctcttccgccggttctgcttgcgaatcacccagatgttggatggctcgtgggcgaagcgtgtgtctgtctgtgcggctgcttggagggggtcatatgacacgataaactccagaccctgcattgttttcagtcgggcttcgaacgcttcgcgcgtctcgacgaaatgacggaaggcatcgttgtagttggcttggatggcgagcgaggcgttgttggaggtcgcatcaaagaaaggggattcggcaaagtaaaatagaactaattgacgagaagattaatctcaagtccaggtgtggtaaggtgtacaacccactgttgttggaatgaaggaatcctcccatcatctggacgtgcgggggagaccgccagaggatctcctccattgaggcatcttggttcgccatttgcgactccggaatgatagaccggagtcaactcggtctatcaaagctcgcgacaagctttatttttgaaaatgacgcaggaggtgcaggaggtttaaggaaaagacgcagctcggaagttgaggctgcggagaaaattatgtttgctttgtttgcatgttgacagtatatgatggcgacgggggagaaagagctgaatatacgtacttctaatttctacagttaaatggactatatacacatatacaggtactgatacaataaccaaaggcaaccaaaacgccaacgccaacgctgaatgttgaatcaaatcactatcccatcgcatggatccggttgttgaaagcagggaaaagcatggatcataatgcgatcaagcataagtcaagatgaccaataaacaaagctgcgccgaatagttaagaagtcgtagctgatctctcgtccgcatcaagcggcgtgaagacgttgcaaactacacgcagtttggtcaacatctcatcccattcgccctccgctgtgctgagtgcggtaatggcacccccggcgccgattcgccatgtctgctgcttattctcggtgtaatctcgaccaccagaacaagtgaatgccgagcgaatcagaaccgagaagcttccacctccgccaaggtccaggaaacccatcacaccggagtaaatgccacgcttgcgattctcaatcgtgcaaagatgcatgcaagagcgttccttaggcgcaccagtcatagatcccggtgggaggcaccgctggagggtggtcaggccgtggacggacatgttgggggtattcaggtgagaaatatgtcgcacagcgaaaccaggatgattgggccggatcttgccctttatgtgtgtgatcattgagtagactcggccgtaatctgcgacttcgagcagcttctcaacatgaacgccacctgatccgcagatgccgtacagatcgtgccggatcaaatccgcgatcatcagattctcagccatctctttcgtggagccgaggatctcacaggccttctccatggtcatatctggtgattttcggactgtgcctttcattggcttcatctccagtgtcgattcacggtcccaattgaggaaacactcaggactgctgctggcgatctttgtatctcctagatctgcgaaagcgctgaatgcagcgggattgtatgttttgagtcgtctgtacagcttccaggggaacatcaaacgatccgactctaattctggaactggcaatgtgattttcgtctcagaggttaggcataattcataagattcaccagcttccagctccgctttgcatgactcaatttgtcgtttgtactccttttcctcggggagctgaattttgctctcccggagaattgagtccaagccccgatccgcagatgtatcattgccactgtccgaaaagttttgcagctgctgcagtgtctcatcaagccaacccgcatcatcatcgcgagtggattgaataacaacagtgccagtagtattgtcaaccacgacacttctttcacaccacagaaggctgacatcgggtggatccgcaaaggaaggatcagatttcccggtgctggagtgcttaggtgacttagaagcctgcgcatggcccgtgtgaggaagacaagtgagaccaagttcgtaggagagataacccaggaagccaccccagaatggcacctgagaatttcctgaatcaactttcttcatttccatcaaataccgtaaggcatcccacaattgagcgactgtaagataactctcaacctctttacagtcgccatacagctggagcattcgaatcttatctgtctcaacattgtattcaaaccgccatgagccaggactcggcaccgatgcgatactgtattggccattggattggaaaaggactgctggtgaacctggtttgttgaacacttcacttatagcctcggcggtcaaactaggccggtcgagggaccggaaagacgaaattttcgaagttgacttgctccagttgaacatatcataagcaataccagggaatgcactaggggctgtgtgggggctgatgactgtgctgggaagggaacaatatcccccgcgtccaacgagcttgttgtatccaagagccatcttccaccaattccggagcagtgccttgcaggcattgatttctgatttgcaggattccgggtggaattgaacaccccagaatggcttctcaagatggcgaaccgccatgggtatctgtgtttccggacgatcctttagagccagccaagccaaatattccaaatcggtcgatgttgaagcagccgagttggcacaaagtgagtgataaagcgtcacctctacttccggtagatcctcaaaaatatccttagccgacgtggaaatcttgtggatttggccatgaatcgggtacgggagtcgttcgatgggaacgccatgatgaaggcaaaggctttgaaagcccagacagataccgagaactggaaggagctctgagtcatgaaggtcccaaatatctttcatgataccgacatcactaggcacgttgggatctcctggtcctggaccaagaacgacagcttcgtagtgctggagaaactctttcatattggaattgggccattctgaatcgatagtcattattgtgactttgacccccagggtctcctccagcatggcgacaacattgtaggagaatgagtcataggcatcgacataaaggatgctcttagtcgaggagctgggatcaagttgcggcactctgctttcattgtttggggcatcccaatcaccgagcattggtgccatgctgatgtttgaatttgatggcgaactataccggagaatttcgacgatcccggaacaagcactgggatcaaatcaaatctcagtgatcaaagctcatctgcatagcagatcttcaatccttagcgttgaattagctactcggagcaagtttgccgcttatctgatggagcgcgatcgggagtggcaatatgctcagaacatgtcccaacgaagacaacaaaaaaatacttagaagtatagccttcaaatgaggacgttaaccatgaaattgaagatgcgagtgtgctaacaatgcattgttgttgaagcaagaaagaaaaaaaattaaggttgcgagataaattcgaaggtcaaaagcgggtaccgacggaagtctcgcggatgtggcaatggagggcaatggattttgatattgggacattttatgagaatgactttggaagatcttgattattttacttgaagcccttgaataataaaatttcggtgagaagaacaatgtaatatatcaaatactactctctgtaagctcctcaacaacgcaagaggtatatatagccacgaagttagacctataaatagacattcatacagggtctgggttgtatcatcctacatgtcagactatagagaacgagggacaaataactagagtgcatgataccggtcaaattccaacatgaggtgccaatatatcataaacacatttatgggaggagatatccttgaaaggattttcacattcactatttgcaaagaaaagaatcaaaatatttaattagcaaggctaatgcactttccatccgaatagaaaggccaatagtatttatcaaggcaaaatatcaagactgtccaggctgagcagctggggctggcgcctgcagcgaagcgagcttgacagcaaccttagggaaatattgcgtcacaaagccctccgtgtagaagctgtgcgcagaactgtgatctccgactaagttgtgcgctagctcatggcacagaatcacccaccaatacacaatagcatcagtgcgatctgggctcgggctattgagtagctcctgctcttgcaaagactggaagtaaaagtagttacagaaaatactgcccgcgcgattgaatgcgatcgtcttgccgcccgggtcatagaagatggtcaggctgtcggcccgcatcgagaagatcatgccacagtcaaggaggatagacgcaaagaggttgaacccaatgcggtttttcgcgaggaaggcagatcgttcggtgactgcctttgtgaagaggacgttcatgccactagggagcgtggcgacaaattctagatcgtggcttgggcgctcgtcacagtaggacttgctttcttgaatttgatttgtctctgggcggctgtacacgtcggaggatccatgaggtcggcatgcttggacggcggagagaagctcggagttcaatcgatgcggcgaattgccatttacaggttgttctgggcgtttttgctgagtctgggggtcattgggggcgtaaggcggtggaggtgtggaagacccaggaagcagagatcgggattgttcttcagtgccggagtttgagcctgacggtctaatatctaagccaaatcgtttcgatagattgccaaataagcctctgggtcgcttcggcattgtctctgggggaacggcatgtgcttcttctgacaaggtcttctcgtttttcggggattctgggaaaacgccaggcatcgaattttgtgtctgtgcttcggccctctcttcgtcggccagttgagagtcacgctgagcttgccccgccgcccaggaagcttctctctcttgcaaagcacgcctctcctgctcgatctgtttttggcgtttatcttccgcgacccgagcttcttgggctttttgcttcagaatacgttccacgttgtaacctcgagcccggagttctaagagatcggtcttcaatagcatttccaatgtaagggtagagtgcagcttcggtcgcttcaaaatcaactgcaccaatgcctgactgatctcatacaggtcgtatcgatctggacagatgcataagccaacgcctgaggtcagccgggcgacaatcgcattctttttctgcgtgtgcgacacccgtcgtcctttcagcgatcttgtaagactgatcgatgtcacaacctggactttgaaggaatgctccaaccatcgggctccatgcagaacatagtctgcgggctgatcatgcaagaaaagccgcgcacgctctaggatcaatttctctagtttgtatgcaggggtttgatccgaggcgatactaccaattcgtgcgtgttcttcaacaagtccacttaagggtatagccccaagagtagcgtagaagtcctccaatgcctcttcttgtggagcggcaaaaatgtgttctttgaaaaggttgaagctttggaaatcgtctaccacgacaatgtctttggcagaggcaagacaccattccttgatgtccatatcgtcctcctcatcatggaactccttcgacttttctttgccaccatggtctgacgcagagggtgggatgtctcgactagcaagaaggaattttgctctctgcatctcaacaaaaagatccttatccttcttcagcaccgggagcacctccgcgagagtcctgagaagcatgagatatttctccgaactttggaatgctgcagatatgcgtgcgggttctttgaccaacatgcgtgcaatctcgatcttagtcggttctcgttttgagccgatggccatgaggaagagatttgcctcctgtccaaaatcgacaaagtcaaatatgtccttgtagtcctccccgtctccgagatagcacagcctaggggccacgagccggtatttggctcccttctctgattgatggtggatgggaattgggattataggagcctggcaaatgcggtttatatcttgctgttttagatcagatattctgcccgccaggtatttaaacacaatccgtgcatccctctgcgtagtcgggggctgcttcgcgagaatttgaagacagtctgtcatgggaggatgagccttgactcccagtctggaggcatgggggtggaggttgttcctgagaattttgaaaccgaacaaggcagcaccttgatcggtaaagcacttcttcggagcgcttaagctatcagatccttcaatgggaaggaacggcactattaccgcactgatatcaaacgaaacataaccatttgtgtaatactcctcgaggaaatatgacagagccttgcttgctcgactatctttctctgtggccccggctgacatgagcatcactagttcaacagctgatgggcagctcttgagccccatcatcgtaaggaatttaccctcattgctgctgctggtataaatacccggccattcgataaccggtaagccgagagctcggagcgcatccttcggctcataaagctcggaaatcttgtaacgtgtgccttcgatgccactaccactttcggcagtacagatgctcgtctcctttagtctctgaatgtcgttcgcaggaatatcctctcgtacagaggcaaggtagcggatgagatcaacatgattccatttctttgacgcaggacctttcaaatcactagatatcggagtattgatcagacgctcaaagatcacaccaagctccacggttttgcgaactccaagttggaccaggattttctccttgacaccattcaggccatgaaccacaggcaggtcgtcaaaaagacgcacagaagcaaaatatgtttgtacgggctgcttcattccaagtttcgtggggatcacagtctggggttgaagtgtggcgacgatactttgctttgaagcttgactgagggtttcccactgctttgacaaaacaggcaatacctggcccgaaaaggttgctgactgcgtgatatcttgatctattgagaagatactgcgatttccgcaatttttgacgatccagctaagccaaggaacgatttgcagctcgccccagccaagtgcctccaggtcatgcttgttcaaagacttggtgaatctgaaaggtatcacgctgggcggtacgggcagttccgctggaatgcgctgagggttcaaaaaacaggtgatttccgcaaaaataatcaaacgagtgactccatctttgtcctcgtcattagccactgctacgcgtagtagactctggaccgaagagctatcaagctgaccagcgacggctttacggccaagccatgatatgaattcaaggacttggttaggtcgcaaagtattggactctaattcacgcttgatgtctgataccgtaacttctgtgaccaacccgaaatcggtcagccttttgacaaaatctttagcgccctgtaaaaactcctcaggcaaagcagaaattgagtccatgaagctgagatctttgggtgcgatgcgcgtttgatgactggggatgacaccacaggtagaaaggacctcaatagaggcattcttgttgcacatccagaatgcatcttcgattgtctgtcccaaaacagaagatggggtagattcacggaatgcaaattgatttgcagtatgaatagcctctggtagtacatccacaatgtcttctttccgaatcttagacgagcgtgatggtccaactctggatgcaagtttcgattttatggtagccatctctgcagaccaagcaattcgacaaacaataccgactgcccgcaacatctcgagattccatttgctgatgtaccgtgtgttcaaatctatgctctctcgctccacagtaggaatgacagatggagcagagacatgggcattcaaaccagtcgtctgcgctgtagggaacccaataaagactcttccaccctttgagggtaatattgatgaaagaatttctgactgcgatgaggacgctccagtcgccatgttggcgtcgtaagaaggagttagaattgcgagggttgccttcttaggtggaggcttccgtgtggcccgttccaattctttgctcagttctctactaatagatggttggagcgatgccgtgttgatatgcaagaagaccgatgctgagagcatgctattcatgttgcctgaatctttctggccctcaggttccggtttctgggcattggattgtttctcgggtgcactttgcgtgaatttagagaagaaactcttcagcgaacttgttgaatctcgaaagttatcaaggcggaacaagcttgcattgggattccattccacaattcgcatccacgaagcgtccacctgcgcgatttctcgagtgacattgacaattctcatcaaaccctctgcagttttagtgtcaatgtctctcggaatcgggacatcgacgctgggagccgtcttcttttttgatagccgcagaaggttccaatcatccaaccaaagttcaatctcttgtagtgagacaaacgtcaaactgctcgacaaaaattgacagagctgcagcaaagatggaaccggggaagaatcattgcgatagtccaatacaaaagtggtatcctgagttgcggcttcgccgaggtccagccggcgggtaaacaacgcattccccttccagtagaaggccatagcttggctaccagaagacacaaacggctcctcacaatcatcgaacacactataaaagcccactccgaatgcaccgatcttagtttcatctgggtttccgtctgcgatccgcttcaatcttgcccaatccttttcgctgaatggagcgccattatttgagatcagaagacgtcgaagagtgtggttggtgatagtatgttttagatgtgcggtgggatcatttgatgaaggtgatggtactgtggtcgatggaagggtctcaaacttgatcgttaccttcgttgcagaggcatcggcagcattttgaatcatttctcggaggaccgtcctgttcaatcagtaggttaatatttggatctcaagatagagaacatctgaatctcaccatttgccggagtatcgagccagcactttcgaaatcaatcctcttgtatcgactgtcacagcttcctcatcggcaccagaccccatagtccgcgccttcaacgcgttgaaatccacattcatagccatcttggtatgttttcttctatctgggtatattggggccttatatcttaatcagattagacatggaagttcatctacacctctgtatgaacaccgatgagtaacaagattgaggttgtctaggctgccgtgaatatggtgaacttggggccactgttcggataaagcgcgaccgaagccggggaaacaaaagttgacagaacgctgagcagaggttaaattccagtaaagacaaagaaaagataaaacaaataagattatttggtgagaggagggcagatcgttggagactgcggagtttacgtcgggtttatccttatcggtagaattgccactactctccgccctagtcccgagttatcatctccgtgtgtacacattcataggagaccccggacccgcttttcgtccagtctctcgcaatttcccctattacatgatatccgaaagctgcctagataattgtgtggatgtgggcttaatataattaactgctctcaactgacaggatgggtgttgaccctctgtccccaattgcgcctgtgcgcctcagggcgctcctcctccccatcggcaagatcaagcgctcgcgctttttgagtttcgctgcccgactacaggctgaaaatgtagttcgactaggggatattagtcccgatgcgcggccgaacagaagtatgccctacgcatgatcgcgaggagttggacattgctaccatatatactaacctgctcttgtcctagacatgttttcaccgctggcgtttcctaccggattgattctttatgacctttctttctctgtcccgccgacctcgcatctcgaactatttccctttgaactttacagagagccattggttattattgcgatcgcagatgggtccgaactgcccgagagcactggcgacgagcagaagcaccccactccggagggactagatcggttgttggaagagctcgatggggtgaaggagaggaacccacgggctttgttaaatcaactcgtggtttttgatcaccctggcttggacaagattacgaatggaccggataatgtcctttgggttcctccgccccagacctccaaggccacgacaatgaagacagttctatgcgatattacgtctgttctactctccgaaatggatgaatttgcaaaaaccattcaaagcataccgtcaatcgactcgcccaaagcatcgtcatggggcccgcaccggaacccagaactacggccacggccggtagaccgactattgaatcgtatgactctgcccacccagatatcatcgaatccgcacggcacacaagatggtactccgttgagatctaatgctagctccccagctcctagcgatcatgaaactcctacaacatttgatgagatcactcgggcaattcacctatccagtcgtacaaactcgggaagcagagcaccttcgacagcatccccgaaggagcacagccgtgaccgaatgtctgtcagtggtatgagtgctaccgacagaactaagaatcggatcaagggccgtgccggggtgattattggaactcttttcctgcaggcgggaaggtggcccgatgccctcaaggaactgactgaagcggcgaataacgctcgagcaagcagcgactacatctggcacgctaaagcgctcgagactatccttctttgcctgctgatgttcgggtgggcaggcatggactttcaggtatgtggatcactagcaatgccatcaaataccctgggtactcgtgtcagatcgctgatttgtttactagattccatcagttctgtaccctgttgcagacaaatcttccaaaccttcccgcgactcaacgacccctagtagcgctggaaatagggttatctccctacacaacctagccaatctcttgccagatctttcaaacaccatcttaaatctttatacccgcgcggccaatatcacagatgaacctcttccacagctggtgttctcggagacggtgattcgattagcgcgactgatggtgtcagcccgcgttcgcgatggagctttggatgacaatgctttgaagcacattgtaatgaatgaacacttggttccactactccagctagagcttcctcggggaactgtcttgctccgaaagtctgaaattgctaacttcttataccgggctttgccgcttgcccttggtgcagacctacctgcgactgacgctgttcccataattgttggtgttgttgctgttcttaattttcttgacctgcctagaaagaaagcattcattttgcgtgagcttctttcagtaatggtaccaagtttagtgcaagcacgaaaaattggtgcagcggaggtaggcattcatcccgccgccgggttggcgtctctgagcgacaccgcatttgatgtcaattccttagacgcaggccccggcaatatggagtcaagtgtgcgtctccttcttgcgacaattggagaaatctacggtgttcaaccttcatcgttctacgaatgggagaagagacaaagccaattatccagtgcgagtggtcttcaggaaagcaatgaatatgattcggttgctagtattgccgagcgggcattccgacatgtagttcttgatcgttacggtgatctgaacttgaagattgatgtcctaaaagcgtgcatcaactgctgcgaagcccttccggatttcactggagtcctgcgttttacagtcgagcttttgcagaccattcgaggagatatgatgctgggtgcagcatacagatccccgccgtatctaccgcaagacgaacaagtccgccttctgaataacattaagcgcaccgtgggcgcaggcaccagattaggtgtttctgatatggtagcagagtattgggatgacttcctggtgcgtgatgtcaagttattgtcactgccagatcccaaaagacctgttcggcggtccaaaacggagctggatgcggttaccacgagttcggacaaggcgaaaaaggatccgttcctgtacaaccccttcgccaagcctaccagcaaggcattggaaatgctcactgtcgctgatgaacctgcgccgttccaagtaactttgcaaaacccctatgaatttgaaatcgagattgaacatctgcgcttagagagcagtggtgtgccatttgatgcagtggcagaaaatttcgtcatcgcgcccctctctgtgcaagatatcactgttcttggcgtcgcccatggggaaggcagccttcagatcacgggatgtatcgtgaaagtgcgatactgtcgaacgcggagattccccatcttcaagacattctggaagcctgaacctgaggtcaagtttaagcgaacaggcctgggtgcgaagaagcctcttacagagcgcccggtttcctggagctcaacgacctccaaggatggcaagattgatgtcaaaaaaggtccggaaacatcaacatgtgaagtcaaggtcatcgccagacaaccgtcacttgtcatcgaatctatgtctctatcgcaatcggcgatgatggtccttgaaggtgaagtcaaaaccttcactattacacttcaaaatgcctcttcttgccctgtggattttgtcctgttcaccttccaggattcaactactagacagctacagactgcactgagtaatagagatctattgccggtcgagatctacgagctggaactcaaattagcaaccaagcccgctttacgatggcgtcggctgggccaggaccccagtgattgttcgattgcagcaggccagaaggcaacctttaccgtagacgttcttggaaaacctggtttgcaggagacaacagtccagatcgactactcctacgttggaacaggcccgggtgaattgcctgatatattctatacccggcaactgtttgtgccgttgacagtcacggtcaatgcgagtgtggaggttgcccgctgtgacattcttccatttagcggtgacttcgcctggaagaaccatattgaaccctccgtcgactgtatacaaaagtcggatgcgttgctctcgaccactgacaatgagcccttcgcgcaagtcctcggacgccttggaaaaggggcttacggacctgatcactgtattgtattgcttgacttgcgcaacgcctggccgagtcctctctcggtgtggttgcgcgtaagtgaacaaacaatggctgctctccaaccggaggcgacgaccacggatgatcctgagggcaagtactctgtcgacggagacctccaacctggacaggtttgtcgttttgttctggttttgcctcgcgtctacttagacaacccacatgcctccatccccgtcgtgaacaccggcacacggagacaattcgtcgtcagcgccaacaaattatcatttgaagctgaggcggcctcgcgcgaagccttctggttccgggaagagctcctcaagagagttcttggaggctggaaggaacctgccacaggccgcgaaggatccattgacctccgaaacgtccgactgaacaaccgtatggtcgaagccatgcgactcgaagatgtcgaaatgagattctctctgacctcgccatcatcttcacccgacacttccgccgcagtggaacaaacgggccgctcacgcttccacgtcaagacagacgacctcctcaccttaaatgtcaccgtccacaaccgctcctcccgccctattcaccccatcctccgtctccaacccagccttcgccaccagccaaacaacatcgccctcgatctaacccgtcgtctcgtgtggaccggaatgctgcagcaagcactccccgtcctaccatgtggagagtctaccaacgcctccatcggtgtcacggtcctctgccgcggcgaatatgagttcggcgcaagcgtcgaggaagcccgactcatacgtccatctttcgacgatgatggtgatatccctgctgaccgctacaacgacgatggtatcatggatacctttggtgcagatgtcgtgcggcgacgacggatttggcatgcaaaggagttgtgtattctcaatgcgagcgactgatgatctcggtgtttgactgttctggtctggtctcgtgtcatttgaacgtgagcatagacataatttcatcttgtctaactcctgtctttttcttcttttaacttaattcgatgatgaccatgtagcatacatacccttaacacccttctgtgcaaacttctgtctagatacctcaggcgttgtctgtttcccactgcaaatatatttgaaatctgtgagagcatgatatgctgttaaaaggatgtatgttcacagaatacgcctcaatctgatatgttcctacgaaaatacagggatttactaaaagataactacgatggtcatggatgttaggtgtcactgcggggttatctcgggcttttccccgcatttcctttaaatagatcgccgtgtccttcacttggatattcactttcaaattctccctcaatcatggcccaaactcacctccttactttaaactataaaggcgatcacaaaaagcctgataccatctatgacacccaaaacttcctcgataatgaattggttggctctaaaacaaccacatggatcgaggtccacgaccccgcaacaaacaatgtagtctcacgagtcccggaaacaacccttagcgagtgcaaagccgcagtgatctcagctcaaaatgcattccccgcctggcgagacactagtatcatgaaacgacaagaaatgatcttcaagttgaccaacctggtccgagagaacatggattccctagcaatatccatcgtcacagaacaaggcaagacctttgccgacgcaaaaggtgatgttctccgcggattacaagtctgtgaaaccgcctgcggaatcaccacacagcttcccggcgaggtcctcgaggtagccaaggatatggaaacccgttcctaccgtctccctcttggggttgtcgcatccatctgtccattcaacttccccgccatgatccctctttggagtctcccgattgccattgtgactggtaactgcctgattctgaagccaaccgaacgcgcaccaggtgcttccatgatcatcgctgagctctgcaagaaagcgggtttcccaccgggtgttgtaaatattatccacggatcgaaaccagcggttgactttatcttggacgccccggagatcaaggctatctccttcgtcgggtcgaacaaggttggcgaatatatttacgaccgtggcaccgcgaatgggaaacgcgtccaggcaaatctaggcgctaaaaatcacgcagctcttctgccggatagtaataagaagcatgctttgaacgccatcgctggagctgcatttggggcggctggtcagcgttgcatggcgctaagcgtcttgattacagttggtaaagctcgcgaatggctgcccgaattggttgagaacgccaaggggtaccaggctggaagtgggtttaacgcccgatctgatctgggtcctttgattacgccccagagccgggatcgctgtgtagacctcatctcgagtgcggagaaggaaggtgccactatcgcgttggacggtcgggaatacaaacccgagggttttcctaatggaaactgggtatggaaatcctgagtcccagtgtttacttcaactcctataaactatcctgctaacacgtcaacttgataggtcggtccgactattatcaccggggtgaaacccgaaatgagatgctatcgagaggagatcttcggccctgtcttgctttgcatcgaagctgacacaatcaacagcgcaattggcctcattaatagcaacgaatggggcaacggtgcagtcatcttcacccagtccggatctagcgcgacgcacttccagaagcgcgtcgagtccgggcaggttggaattaacgttccaatccccgtccctctccccatgttctccttcaccggtaacaagcgaagcgtggctggaacgggactgctcaacttctatggcaaggacggtctccgattctatacacagtggaagactgtcacgtcgctgtggagaactgaagatgcaactgagcttgagaagccaacctcaatgacttgatttggtcgtgacggataagctgcatacggtggattgggagatttttgataggcacagacatgtcgagcattttcttcctggaaatcattgcattaggtgcattcgtagtattaacaataatagtcggcgggttatacagcctctatccttaacgtaggattccaataacttttcaagcgacatatatgtaagatgaccatccgatgtcttttttagataacgagtcgacatcgacaagatactgactctgacttgagttgcaatttacgctggcatctatatctttttgttgttcaatgactgatcattctgttctgtaaccaaagacagaactctcccaattgcataatatattcccgtcaaggtggattaaaaggttggtctttgagaatgacccactcccccacagtgggcacgccggtatccactctcacgggccgatattcttccgatctcttgatagacccacgagtttagataacttagtgttaacacatcaggtgtcacttgataatttaatgccagaagtatcgactactaagcaatgaatcgagattataaaggggctatgttttgacataaatgagtttggatctcctatttgcaatttgggttggcatactggatccaagggaattagatgctaccaacaaagtagtaacaatgttacaatacactcaccgatctgttgagataacaggataaaatgcatagcaaattagacagaatcttgcacaagtaactttgctgcttggcaaaacagtctggactatgtgctggctcctattgaagaacagagtcagggttctttaagctcttggcaataaaagtcagcaaaggaatgcgcctagaagaccagggtaatactcaaggtacaaaagagcgttggaaggaaatttacacccttcactcagagtgcttgaagtacgagtcaatcttggcgggttcaattgagaaaacagttctggttccatctagagttgcaggcatgaatgtcgcgttttgcacaccctagagacaaatcgaggctgttggacatgcactcaatgatacccaattcccgcagctgtcgctcatcttgagagaagatggcataacttggcgttcgcttagatgccgataggttccgggcattcatatccgtggacaatgttcccatcgagaaaaatcacaaattgctttcatagcacaagataagttatgatacactatcacttctgactttttttgggggtaggacgcggagccacatgaaatctctattagaaggtgctatatgcggaaaaataaccaagggacaagaaatcacaaaattcctcgttcgaagtacgaggaccaaacttgaaatgagttgaatagcatgattttatcgccgagttgaaccagctaaataagtatcattgaaactggcatcttctatacagttatgcttctcaacgggctgcaggatgcgctaagaccgccacctgcatgtctatattctaccaaagaccttgtttccgtccatggagcactgtttcgctgctctcttcaacagcccggccgggctagctcaatcggtagagcgtaagactcttaatcttaaggctgcgggttcgacccccgcgttcggctattcctaaaaaccaaacctgagatttcttttttgctcttttcttttttttttcgcatgggaattggatgagtttttcaaggtccacttaggcctgccggctccggcggaaccttggctagcgtcttggcgtttgtattacctaagcagaaaccaaggtgacctccttgcacacttggcaatgctcttcgcagtaacaactggcaggcttcgaaactcatatatagcaagcagtttattctgttcgagtccaagcaaagacttcagctgctcacaagtatcagatctctatctgttggaaaagtttgatgcagaagaatggctcaccgttcaacaagacgtatatagctcattcgaagctctgcagtgggaagttaagtgaaaagcactggatcacgttaccgccgcactgacctctcaactggtcagctcatcggatacgagtttttctgaaacacaccgtactttaacatctacatatacccttgctgcatcatcactgtgatgtgttggccatatgtgagatctttaggcgcgtggcctaagggttgtttgttgaaatatagcctccgttcattctcatcctctacccgcatcctcgctctactgaaacctgaaaatctcgttcccatgaacgattcccaattttctattaggccgaagcctcagaatcccaccgcacaaaggttgggagaagttctttcagtatggcttcctaacaaacccgagggcctttacgatcaatatttgcaaagtctttctcctacttatgatcatttgttgacatatttacgatacgaccggatctggcgtttttctgaacatacccctcacagcctgtcctatcattctgagagtgctcttttgtcctctccggtgtttgtagtgaatatcggcgacggcgatcgagttatagatcatggtgactatgatgggacagaccctgaatccatgcgagacctagaattacacctttccaacacggatcctgattcaaaggatcaccctcgctgtcgaatcatctgcgcacaacatatcacgtgtttgggcatggaggcattgggtagtggactttctttggaccctaatgtcttcagtcaccatatcgggacatcattcaaggacattgaaaagagtacaggtatcaataagctctgcaacacaaatattggccatattccttcatctgtcggtacctacgagcacgagagaaaccttcaaatcgtcaaaaggcacctagggcgactttccattgccaatgtggagcatgcaaaagatctaactacccgggattcgattgtcaagtccatctaccttcatcaggaccatcccatcacattttctgtggatgtgccacgaacgatctatgtgcaaggatatcaatctgaggacgacagaacacaggctattggaagattcctacgtataagagtgttggcactacaggaccgagtgctgaatcgtcgcattgctcggcagcgatttgttgacgatagcatgttctgcgaccaaggtgaacgatattcacaaaacggccttgacatcctacagcacattaccatccatgtcataaacgacgcgaaatttcaacaaggtatggatgactctgtgtttacacatcaatgagatcgcacaattgaccaatttaccaattaactaattttgttagtcttggttttgtttccaccttgtccagaatttgatggagataattcagacaacgatccttatgtttttcttgaccatctgagaaagcaagaacataccaaatcattcaaggaattctgtctcaatcgggataaaaaggactatgaatccgcaggggcatcggaatctcgacagactatgtctcaagacgttgaaatattctccaatgatattcttgagaatcaagctggtacccccaaaggactaacggacgtggtccaccttatacgatcttacgctctgaatgcatggtttgatcgtctgcagacattgaaagaccagcttgaagatctcagtcttcaaagcctatcccatcgaagcatacaacatgacgaagatccacaggattcagaggaggaaaaccctacatgtgatggtctgattgatgaagaagggatgaaaggtgctattcttcgctacatcgcgtcactcgatgatgaatgccagcggttgaaaattgatttgcatgcggcgaaaataggattttccacaaccgggtccgactctgttcgaacattagaacagacaatggagaagtatactcacatacgatcccaaatgagcaaccttctctctgaaacccagcatttactcgacatgaagaacagcaggatacaacaggctttaacaactctcgaaatcaaagaaagcagaacgttcatcgaacaggcaaaaacagtgaagaggtatgatgttggccaatcttgagagaattaggactgacatatgctaggcttatcataatatccttcctttttataccgttgtcctacgtctgcttggcattaagcatgaaattttggtaaatggattgcccaaaggcattgctatgacattccccggcgtttactttgcgggctaaaggcaatgagatcatcataatgactccaaaatgtgttgagacgagacgccgggatccctgtttatcaggctagctagcctttatttgtttgtaggggatattctcctctttcctctcccctcttgtcaaaatggcatgaatgaatgcacgtacgtctgcgttatgggtctatgatgtaagggatataccccgtagtgtggggcctatggggcttcaaggttaaggctcggcaggacgggatcatcctttagttcaggtggggtcacgtgcttgtctttttctcatgtatgaagcccctgatttaatgcaagccttggcttatttatttcacgtcagtctcttcgtctatcctacgctttcctcttgaattctctccaccacagatcaacatgagtggctatccagttttgcagatgcctgctggggcaagattcatcgccgtgggggtcgcaggggccacaatcccacgggatgttctgaatcaaccttcaagaccatgcaacatatatcatacatcggatctatgtatcacccgcgaaaagcttatctaccagactctgccgagagagttaaaaaacagattttgaatggggtgtagtcagaattcattttctcccacatagagtcaaaaatggtctttcaactcctggaaactacgcataaattaattggataattcaatacttggctaaaattaaaaccgactatggtagtttaagctatctatttagatcgggaatctagatgtcctcgaacttcggcctaagctgagctatatatacattcagttcgtcatttacgcaaatatactgctgtcgctacatgactgtgcaaaggagtccgccggcgagggctaaagaatgttagtatcccaattttctggagtatgagatgagatggcttacctccagatatgatcccagacgccagacctgaggcaataccattggcggcgccattgaacaagttcccctttttttcactcagcttttgataggtattgcgggcctcactaacctcccctcgaacagcatcgacctcttgctcgtatccttctagttcaagtgctaccttccgggaattcttagcacgtcgagcggtgtccttgcggatttctgcaagtgactcctccatgtcgcgtagctcttgttccttagctgctagctcctcgaaaaatctttcttcgagtaccttgagtttctttttccaagctctttcttcatccttatgtaaatcccgcatcgacttctccagctttcgtttattatgctcagctttcctcatctgattttccaaatccaccttaagctcctgcatctcgatggcatgggccgtattcttctgggcaatttcggtctcgattgcctgtttgagctttttcaactcgagcttatgagcctggcgagctttgtacagatccccagcgatcacaatacctgctttcgtctcgccgatcactttcccctggtcaataatttcgcgctgcagttccaatacctccggaagatgtttttcagattgaagtataagatgtgtcacgatgcggcgtgcagaagtaatttcttctaacgagcccaggcgacccttctcattgtggcgaaacgttgtcgccccacgagaaataaatctaccaaagaaccgttcttccgacaggagctgtgcttcacgctgctcacaaagcggagatttttcggaccacatagttgtcgcgatggctagagtggaataagacgcgaatccacacatagccttcatcatgtcaagattgcgcatgctagaccctgacatgcggttgtcggatataggatgaagcattagtatgccgtgaatgcgcacgccgtttgcatacgatgcgccgaggtaagttgcgaggacgcttagtgtgtcaatgtctgaacggttcgtgtcgttgaatccgggggtatcaatgaggtagactttgtggccattgcagtcgaagttgaacacatcaatggaggtggtgcctggtggtagtattagccagtcatactgagtagaagccttggtgtgagtcatggaaagtagaaacgctcttacatgagtacagcccgtggccaacagtgacatcttcgcccgtgcatcgaccgatgaaagtgctttttcctgagcccgtcatacccatgacgaggaagaacctgtcgttggggctgggcttagtgacaccggtaaaggctgcgaagcgttcagtctgactaaccacagagcgcatgtccatgatggtttgaattttgcgattattgaccagccaaagtgatggttaacaggctgcggccaaaagagcgaaatgaagacaaggctatcggttgagcacaggaataattactggtctaacttcaaaatgcgtgttgagagcgataattctggagcattagcaggcactttttacgtgtcataaaaaccccccacttgactttacaagacgccaaatatgggggtcaattcaaaaaagcaaatatgcgaggcattttggccccaatatgcgctttgactggactcaaaaatgagcttgtaataagccgagaggcgtagcaaatggtgtacccagtggaaaatgaagtgattctacctgcacacctgggcatgggagtcagcccccgggatgaggctgacaaggtgagccacgcagcaggtgccgtgtttcggtgccttatacctgaaaggaatgcacttgcatcggcgagacacacatgcagcttagaatccaacgttggaggaatttgggctgacttgattggggcaaaggtttcttggcgacgacgcggtctcctgtggcctttgcccgggtgaacatggctgcataacgaagctgaggcggtaagatattatccaatgagagagttatgttctgctggcacacttagttgcccgtatagacattgaattgtgacggaagccatacagcgcattttaccatgagaacataacaaaaacaaaggttcctattctgaggtcttgggtgccgtattcctatttcgaggcttgatcctgttggtgcttttgggcatcaaacaccgacgggcttccactatttatatccgtcctagcccccttcattattatcccacaatattaactaaaagcctatcagattgcctctcatgtcagtcagatccagctttactagtatgtcttatacttcgcataactaggaaatggtactaaggctcacaaacacacaggacaatcaggaaatcgctcagtgcatggaaatgaatcacctctaagcactcgaagctttcgcggaggtcacgagcccaggtaagtggctgactatagtccaatgtgttgtggccaccatttaatgattaactagaccgaccgatgtattcattgctgtgatgggggtcactggctcggggaaaagttcattcatttcgctttgctcgggcaagtccgtccaaattggccatacacttgacgcatgtaggtgaatcgctatacgaactgagctatttccttggtccaagtctgacagaggaacaggtacctctaaagtcgacgtatacgcgtacagggaatcatcagatcgaactgtttatttgatcgacacgcccggctttgacgatacatccaagaatgacaccgagattctaagtgagattgcgatatggcttggcgactcatatagaagcaaaattctgctccacggaatcatatacctgcatcgtatcactgacgtacggatgcaaggctccgcgagacggaatatccagaccttcagaaacttgtgcggtgaggatgctctgaggaaagtaatcctcgtcacaaccatatgggataaggtccaaagcagcgagggcgacatgcgggaaaagcagttgaaagacacaaaggatttctggggttggatgctgagcaaaggcagcacctgtcatcgacatgataataccaagactacggcgagaagtatcgtacagcggctgacaaaacacaagagccccataatcacagatatacaaaaacaactagtcgatcagaatctccaacttgatcagacagctgccggaaaagggatacagagcgagactcttaaagagagagcaaaatggatgaaggaacaaaaaaagttcgaagaagagatccgagaggcaatgcgccaaaaggaccgcgagaaagaagagataatgcgcgaggagcgtgatatgagtgcggcaatgatcaggaaggctaaccaggacatggaagccatgcgcttcaacatggaagaacttatcgcccagcgagaggagcgcgaggcactcttggaagagcgcttagaaaagcggatggagaggcagatgcgaaagaagcaggctgctcatgacaaagagatcaaacggattcaaagagaaaaagaggccgagatgagaatatcaagagaacaggagaagcaagcccaacgtgatcgaaaaaaggtggaagagaaaaacaaggcgcagcagcagagaaaggcggaacaggagagaaaggcaaaggtcgctgaagccaatcgccagtcgcaaaactcttcatcgaaagttcaaggctggtctcctttttcggtaaccatgggagattacagttgcgctctcagtggaccaagatgttaccaggcgtacgttgacagtgcaagggagccaactgcagatacttactaatcgtctctaccaacagctctaggggtggctggccgaaattacaggttggctcggaatggattggtgccgtcagctatgggacttccggcacatggattgctcgttacggaggaggaacttggcgtaagcaattcctcaaatctgcgacaatttacctagctaagagatgtctcagagtactcacttgagcattacccaactctcgcaggcaaacttgcccatcacggagacagtaatcttgaattttgtgtcctcgggcctgggcaaatgtactatgcccagtgggcgaatgggttctggtgcagcgaagcaacagaacagatcaacaactatttaacggagatttacaatcgatcggatgattctaaagtgcttgccatggcatttggatacaatggcgcctatgtgatttcatttggatgggccactagatcgactatcaggggaaagtccggccatcaaagggatttgaaaggatattactcggatctagaacaattcgccgacgcaaatacttctttggatatagtggtgagtctctcgaattgccttgatcagatctcggaaatctcactttccaacaggccatcgcacttgacccggatagcacaacagattatatattagtctacaaatccggaaactatcggatacgctgggtttgctcggatccccggaggtcacaaatcattaggagttggtgggaccaagaatgcaagcctaaagaggctgtagcgcctacacagtcaacacataaggcttcagtgtcgagatctttcaaagaaatgctctcgaagatcgagaagtacctaattgatgggaataatggatgagaaaccgggaatatatatctatcatcagcttttgtggcagttcgaatattcggatttctttcgtgctattaccttctctgaggagacacgaatcaaagcaactcctgatgaattataaaagggaaagagacgggtagaatgtaatccggtccttagcaccagatttcaaagcagatgtaaccacagagccaccctgggctccggtggcaccgacaacagtaaggattttggacattttggatcaaagtagaaaagatgagtgtattgagatctaagagataaacagtagaagcaatgacatggaagatcgaatacggtccctctatatatattttgactactacacataagatcgcctatacatggacgaagtataccacggtacagtgatctgcatacacgctaaccccatggggtcgggactcagggctacaataaccccgaaacgccggattccgcatcttcaccaacctttctctcttatttttttctcagcaactcgtcatgtacaacataccctcatctgtctgcgttttctccgcataaacaagcattattaatgaactggcccaccgcacccggagctcgggttgtcgatcgatattgcttcagtgttccacttcacattgtgcttcaatttgccgtctcatcactcaataaatagtccccttatggggcttttagatagttgccttctgaatgttatggcggtccaaagatagacaggtgataccattggcagactagcaatgtacgtggcggtgaagtgtgtaaaacaatcgtcgtttgtcgccactttccacatggtctcgggagtcaaacgttggactcctgctaaaatcgaaccatcgtgtatgagtcttctatgggcgacggatcaaaccactacaacgtttatctagtatacgtccatcaattaaccttgagcctttcaaagagtagattacctctccctttaatggtagcaccatattagagatagagacgagagtacgtgaagaatgcgtgtagtaattattgggaacatacggagaggtcacgcgacctggaataatctactcggcataaaatattagtcttggcatccataaagcttaattattaatactgtattattcctccgtcttaccgccctaccttctcagcacggtagtctttttgaattctaccagtcctaccgatttgaacttctttcagataaaagagcagtaaattgcttcaaaaacatacctcgtattcattacgctcgcaaaaagccttgtgatcgaattcattatagagttcatctggctcaggaataggctcagccctcagaagctcttcaagctatgattgcggcatttccgattgataatgcgccatggtagctagtaaaaagattggaacgatagtttgtaatgtgtatatacacagatactatatatattagatgtagagttgtttatcagtaataaagtataagaatgtacccctcgtaaacatacatgctccataccaaaacgggatcaaagataccgtacgatttccaaagcaaacagtgtttacataagcccaaactaggggcactagcgtaagcattgaccatggtaccaggtacctacgtcccctgaccttatctgccgaactatgatcaaccgtcagccagccctccgggaaactaccccggacaaacccccttgtgaaggcagaatttggctctctctgcccaaatgacacgcgtaaccactattataggcgacggatcggaccactatatcagctcgccacacgcttttccgcagctgtaataaatatagcaacttacatttgatctaattactcacttttctacggtcgcattgagttcaaattatgaagatatgattgattgattgaattttcaaaatacaaatttcaaactcaataatggagcaagcatagagcaagcaggggaaaactttgaaaagcggtcttcttagaccgccttcccatcaaatatactgccgattccggtaaatcggtaggacgggcagaattctaaagccggtgaattcgggtatagggcggtaagacggaggaataactatggaaccttggaaccttccaaggttggaatatagaattgataactaagcggttttatgaacgccaagactaatatcttaatgaattgatggacgcatactccggactggtaaatgtgaatagagaagaagaggttgtaatattacatagcctgcccaagaccataattatacaggcggtgattaaagcggtgagccaaaaattggttttgttgttgtggttcgatccaccgatccatcgccctggtggatatgccaagacacgctaaacaacaatgtcagctagccttgcctctcagctgaaatgagtatgtatgtataactatgtctacttacccctgggcgcctttgatttctataaattgagtctcggcttccattacactggtggttgtcctctcaactacattgtgctgaaaaattgtatagcaccattcagcaaccatgaacttggccgtcctgatgtcccttgcgggattgggcgctagccttacagttgggctagaagcaaaaagcccatttattgccggtcggctctcacaaacgaagcaatttgagctgaatctgacctgggaatcatttgcgcccgatggggttgcgcgggagcaatttttgatcaatggccagttccccggccctccactgatcatggatgaaggagacgacgtcgaggtgaccgtgaataacttcagtcccttcaataccacaattcactatcacggcatcgagtgagtttttggaaactaaaaagatacccgcatgtccactaacatgttaatagacaggaaggaacgccgtggtcagatggtgtgcctggagtttcacagaggcagattttgcctggtcaacggtttatttccaaattcactgtccagcagtatggtgcatattggttagtcaataatcttcaataagaaatccaagccctctaacgaattgaaggtaccactcacatacttctgggcaaatcatggatggcctgtatggaccaatttacatcaggtttgtttgcatgatatcgagcgcgtcaatgccaatgactaatgtctaaatttatagacctcggaccattcctgcgaacttggccagtgcgataacaaatgatacatttgaacaggctcaaatacataacgccatccgggccccgtctctagttatgctctctgattggttccatatgacctcagaagaactccaagaggttgcaatgtctgcaaatattgatcccttgtgagtgattcaatgagagaagctacaagcaatgaaactgacatggcgatcaggtgtacggattctattctgatcaacgggaaagggcgggtcaattgccgcagtcccaaggaattgactgacatggtgcccgattcggtgaaatctgtgctacagggcatggagtatacggtgaaagggtatgttctgaattagaattcaatacttggagacgccagcgctaaatgggaaataaagttgccttccactcacaaacacctatgcccaaacgacatctggacataacttgagtgcagttccagcatccatgttttacgagtgccacgccactgaagcggcagaagaggtcatcgaagttgacccgttcaacggctgggcaagtctcaattttatcggctcagcgtctgtctcaactccaattggtgtgtactttgccagtctttataagctcccaggctaactagcaaagtgtctatcaataatcattccctttgggtttatgaggttgatggtttatacatcaagcctgttaaagttgatgtatgaacttttacctttttggaattacctttcacggaatacttctgactcaaacttctctaggcgttaacaatcaacaatggtggtcggtattcctgcttggtacaactgaacaaagcgccaggaaagtacccgatgacagtggcaaatgcagggttcaaccaaaagatcgcgggctttggtactctgtcctatacgcatacgcatggacgttcggttgtatcaacgccttcaatcaactacggtggaatcgccacaagcacggatgttgttacactagatgagaccgtgatcgaaatgtttactcctagccagcctagtgagcattcggataaaacctacatcctgactgctggccgcattgagaaggcttgggaatggtcccttaacgggaatcactcctacggccttactttggaggccgaaaagcccgttctatgggaccctcaatctgcggccaaaagccctttggccatcgccacaaagaacaatacttgggtggatataatcttcattttatctggcaacacatctacacttcagcctggtcacccacttcacaagcactccaaccgagcttatattctagtgagtgcttccaaatattgtactggctcttgctccaattcgctgacatttgacttcaagggttccggcaccggcgacttcaattacacttcagtcgccgacgctgtcaaggctattccagacagtttcaacctgatcaatccccccatgagaggttcgcagctctaattccacagggcctctgtacctgactgacatcattagacacttttactacgctgcctgcttatcaaggtaaaagctggatggcaattcgctatcatggtatgtgatttccccgactggatagaagatcattggctaactagcacggttgaattagttcaaaacccaggggtatggaaatctgaattctgtcgatacccggtcacgtcgctaacaattttaggcattcttgcttcactgtcacctcgacccacatctgacagggggtatggggtaagtttgcaatatgtgtacagctatggctatatttcgatgcaatgtgctaatttctttccttaggctcgcgattctagacggtatagatgcatggccgaccattccgtcccaatatggcccaaatgggaagtggggaagtattgacgcttgacaacttttatccgatttgtacaagagaaattttctctatttatctgttttaattggtctttttatttttcttattcgaatatatggtgtgctgtgtttcaatgtactttttccagatgttcgaagtggaagaggtgagtacatacattctactggagcatacctcccagccagatcctgcttaattggcttttacttattctgaaactattgtactaaaccatacactgcattataatagcattttattcaaggaaaccctataagtggtccagtatgtgttggaaaataattccagtacaatagtttattgtgcaccaatcagctttcctaatggtataaccgggccatttccttcaaactcctcatattatccgccccaaggccttaacttcatcatccaaatgcgtccataaaatatgcgcaaaactacccatcaacatcttcatatgacccagtcgtagctctgtctcgcccgtgcgacatgtattcacatagtcctcgaatttctccaatcccaggtgaatcatgcggtgctgcccgaccaagctcaattcctcgcgaaactcaggcattctcgaggctagctcagggaaaaagtgccgctcctcgatagtgtgatgcagcgtgagttgacgacagaaggataaagcgaggttgaggaatgcaggaatcgattggccattggggcgtttgttcttgacacaagcattgtatgtatcattccaaataatgcggaagttattatgctagaaaacatttagtaggctgtgggaaccgttgtggtagacggatagatgacaggaacctacaaatagatccatatggtctgccaatcgattctaggccttgaattccgacggagttaacttggagagctggattccagcagttgcttctttaactttcgccatgttatattcgatcgaagagcccgtgaacaaatgacgctgttgacagtgtattaaagatggcccaaccccttgaagcgcactctcttaaaatagtatgtagagtctgcgccatttattatcgaaaagtgtggattgatagaaataattgtcgaatcatgccgtaattattatgaatctgcatcacgaaggcaccaattgaccttactatattcgttcggagctcgaagctcgggtaggtgaggtctggaaggtcgctgactaaggtctccagagtccacccgtcccattctaacattcgatcagctgtaagcccggggtagggggatcgttcttcatggactcggagggtccactgatccgcagaatgacctttgttcacttctgcaacacgtgtctctgctccctgccgacagacgatggcgagattactatgatacacttgacaaatacatgagaacagcctggatcatcatcgagctctagtgctgctggattcactactgttccacagtccactgaggtctctggctgcagacctggatgcagaacgagctagtccgtacgagctctagtgaggagacgaaagtgcggactttgaaagacgggtactggttcttgaaccgtgggagcccttgcactgtggtggcaaaccgcacttcctgtccaaagagctggcagaagctgtctctagttcttaagatcatccctgttttcctgtcttgcctccttccatcatggacatatcttccatggtccagctagctctcttttctcttttctcttttctcaaccaaccctcaatatctaagccggaaatcaatatatacagaagaaatgcatctcatgcttgggagctatgtattaatacacaagaatccaaaatagccttgtcttggacaatttttgcgaaatgagtagtggagatattattttattcagccacctggccacagaaagagactcgccggtctcggtaccagccgcaagaacaacccgccatccataaaatacaatgctctgaaaacacaggctgtgagagacggtattaaaagcgagtaaagaaaacaggaacctctatgctatgtcgttgaaatatgatgaccaaaaccgaatactcgagaagagacccaatgtgaggatgtcgttatggagaaagagaagggaggatgagttgagggcgatcaaatgtagataagtcgatcgtgttggtgaatggagaggagggatggtttaaagcatagccttgtactcggatggaggagggggaggaagctgtttcggactggttagcaagcacatcttgaatctaggtccgaacgtatcagttcgaggacagggagtttatcatacctcgagctttgtattatcagccatcatacgctggaagccaataccgacaccctcgatcacagcaaggaagacggcacacataatagcggagtttcgggcagccttataaccaccacggatagcgagggagccaccggtgaagaaaccagcgatgatggcgttgtaaggatcttccttcttgcgaattcccttgattgaacaatcgtatatactgaaaagtcctccccaacagccgaagttaccacctaggacgggcgcgcgcgccttgatagccgtgagagcacctatccgacgttcaccgtaggggctgtttcggaaacccttaacaccgtgccatacggcaccaccgatagcacccatacagaaagcaccgccgaagtcgctcagggcaacccagggacagggatcgcgcgagtgatccataatgtgatgtgtgaacgaagcgagttgagagtcgggggtacaaaggcggatcggctgtatagatagtaattatgaaaggcgcgatggtaaaggtcgaaagttggtaacaagcccagtggaagaaagagacttgtgaagggcgtgaaggtagtaaaggtcgacaagcccaatagtgagagatgcgataacaagataagggcgggtcgaggacttttctttcccatgtcgggcacgtgaccatcatattctacccggtcgccaccgaacactacgacgtcggctgtgtttactcttactttcggattatcattcgctcgcatcaggcatccccgggttctctgcccgggaacgagaatataccggctattcatccctgcatgatgtctcgagaccatcagaaaatttcttcatttctatttgaatactctatggctcttttttcattgttctagggccaagggccaatcggagatcatacatcctaccaccttagaaccgggtattctatgatcgaaagaatgagcttctatagcctcacttcttcatctactaacaaaagaatgtctatcttgacctattccactcacaacctttccacgcttcgcgagtatgagcggtcattagcaaaatagtcggtcgatcacataggatttcgttcaaaatagatatatgcatcagcccatcccttgcaacttaaagtgatgtttgtcgatatctgattcataggtgggtgtctgatattgagttctagacttcttacgtctaagtaagacgttaaagtataactaacgaatattagagtcggtaattgatagatatatagaggagattgatcgtagttgcgaaacatcagattatattcatatttcagtcttttccaattttaaataaatagcaaattgagggagcaaacaacgggaaggccagatgcatggtcaaaagttggtatacctcgcccttctcgccgtcataggaggtgtataagcatatcattgtagctacaaattcagcttatgcattcaaaagcataggattgaaagaattatcgagtgtttggtaggattgaagtgtgacacccgtatgaaaagacgattgataaggcaaatgaaaatgccgagcaaggctcggccttttcggacgaggatcgaaaaatttcgcgaatagcccgagcaaatttacttataaataaagctagctgcaaagagatctgcggtagacatctaggtcctgttccttgttacttgtgctcaatcaactctcggaatgtctacttcacaactatcaaatgaccgggctacgcccagtagctccgaagcgcctgatcgcgtcgaacttgaaaagccaaccccaaaattcccagagggcggcctccgagcttggatggtggttttaggtgcattctgtgtgtctttctcgactttcggatacatgaacgctttcgggtaagctctatactccgcaactctatggtatgataacgaagtctaacatatgaacgacacagagtctatcaggattactacacagagcactttctctccaacgagacttcatccactatttcttggattggatctgttcaggtctgctttctcttcgctggtagccttatcggtgggccattgttcgaccggtacggcgctgtggtaaggacttgtcttcctatcagcaacagcatcattgactaactatactctccatattaggtcattcatatacctgcggtcgctatcgtattttcagtgatgatgacatctctgtgcaagaagtattatcaattcatgcttgctcaaggcgtcttgggtgggattgcttccggtatgctatttgcccccgtcatgacatgtgtgagccactatttccatactcgacgtgctgcagcccttggtgtgacagtctctgggtcttccatcgggggagttatatttcctattgccttgagcaagatgctgagaaacgaatccttggggttcggatggtccgtccgaattgtggggttcatcatcttgttcatggtattgatagcgatgataactgtaagagagcgacttcctcctcgtagcggcaaagttctcttgccgagagcttttgctcgcgctccttacaccctcgtcacactcggtatcttcttcatgatgtggggacttttcactccattcttctatcttccgcaatatgcccagtcttatggcatggaatcacagcttgcgtcctaccttttatccatcctcaatgctgcctccgttttcggcagaatattaccgggcatggttgcggataagattggtcgctacaatatcttgatcatcaccggtgtctgctcgggcattctacttctgtgctggatcgcgacaacttcaaatgcgtcaatcattgtctttgcggggctctatggtttcttttcgggcgggattgtgtcgctgatgtctccttgtattgctcaagtcacgccgagtccggaccagattggtactcatctcggcatgtcaatggccattattgcccttgctggtctgaccgggaccccgatatgcggtgcattgctagaaagatacggaggatacacacaggccgcagtttttagtggtgtcgtgatgtttttcggatctgtgcttgtcgccgcggcgaggttttgtctgcaggcaaagcccttggcaattgtgtgatccctcttcagcctcctcgggcagcttttgcttcaatctgtatactacattagatctgcttttttttactaccactgggtgcgaaaaccttgaaactatgatattatactcttcagaacgacatatttgagcaaggctaattatacatggaagaacccaaaatcagtactatcattcatgaaacctaaatcctccggaaactgttcagtcttgtcagtggatgcatcacaattgagatttcagaaaccaagtaaataccattgagttgagaagttcatcgtcaggaatcatagagctcggatcttctggtaagttaagcccacgtagacctccattatcactgcatacaatcaatacgggtttggatggggcttgtcaacggagtacttacgctgaacctagcagagagtgatctggctgaatgacagcccgccgcgtctgcagtattgtgcagattcggatcactctatctgctgcctctttgtcggatgttgcggctgactctggccacagcttggacttgactaatccaattatcatactgagtaagtaatattcgctcaatccgtgaaatgtcaaattgagcctcttttccaaaatctgtagtacatgctcaacagttgccacgagaaatgtggaaacttcgggaaatattgtcatggtagccgacccatttaaagctttcgattgattagttgcaatcgcaggatttagattagacaagcgcaattgtgctttttcttaccgtgaggcccaaagtttatgtatatttcatggcagatattcagtgcagcaagtagtaatccaatcctacaagcttgttcaggtactttctcatcatgtataagcttttggtaatgatcaagaatcttcgaggatgcctccaatctcgcacgtcggcagactgcagatttgaatgagggacgagtttggatcgcgaactggatgtgcagcaagagtgtatactggtacaggtgaatgctcaacaatctcttcacgtacatcgtggtctgctgttgtcgcggattgttctggggatttttccattctggaatatcgtggagtgcttcttctatctcctctccaaggtgcaagacccggtcaaaatcatcttgctcgcgacatccattgactaaggcacatattttcaatctgacaggcaaagagcggtacatatgtgcctggaaagacgtgtccgtgaatgtggcgaggggcataccttccagaggatcttggcccgacttttgtagctcgtcatcgttgatattcagcggtgattttatgttgaaatcttccattccgacgcttaggggcatcccccgttcaacagaggcctggatatcgagctcaacgatcgtcatccacaagcgccgacgcatctctcgatagtatggtgatattctcgctgtcgagggagattcacgatgatatcctgctgccatagcccaccggaccagtgccccggcgtatgtccagaatgaaccctcttggatatagtttgcacgcttcgcaatgagcaagagacaatgggtcgccaaggtgtcccaggattgaggaggctgattagtcgagttgagccatgattctgcagcctcaatccaatcaagtgcatggtcatgaacggtttgctgattcataacgtcaatgcatatttcgggatgaaagcttgaagcggctgctgccactaagaggaattgcaccaaaaaagaagcgggcgtgcaaagtggactggcccagtgacgattgtaatcagctatgaaagtcgatatattgagtactcggtgtatgatctcgaatctgtcgatatatgtctgtaccaatgtgtccgcaatcggttttatgggaatcaattgtctcagagtgtctctgtctccaggcacagtagtatcattggacaacggacgaagccgataatcatcattggccaaagggtaaatttcgtcacgaagggtgttgatcgccgggtttctggtcttgatttgaacgatgtagggtcggagctcggtaaactgtcactattgaggagatgcttcatatcagttagatagggtgtggcgtacctgttggtaaaagttcagaggatagctatacccatagaacttggtaatagcttcttgtccttttaagtgggtcattttctcatgccaatcggaagagggcctgggtctttccggggtctctgcaggtttacgcaaggccgttggcatggggccagtgctcaccggacggtcatcgctcaacatttcatttactgacgaagatgttgctggattgccacggtaggtgcagctggcggcatttcctgttttcgagcagcgactgcaggatggaagctcccttccacatttcagcttccgctgatagcactggatacaggccaatggggggcgtcgctttttggcccctggcttgaccacacgctgtgagctgattggcccacggctcatcgtttggcttgagatcgattctgacattattagtgcttgccatgagaaatcgccgagcgggagcttttatgccgggttatggtgacgtcggtgatttcggcgcggcaatttcgggctcggcaatttcgaccgtttccaccattggctcgcagtacattttgtccaatcagaggcctacaacaatgtaaatagtgcgtattatggatcattgcggtttattttggcatattttgacagatttattgctgctcattcgatgcgtaggcctcgggtataccagagtctaagtaataagggagctggaaactcgtatccggccgaaacatatataagacttgtgtctattcgagaaaaggctcaatcatctattttatcttcgagaactggactcttctgaagctcaccctttgacagcttccgttctctccttattcagaaccaacaactcgcccagagctcggggaatcctgacagggttaatacggtatcttcatacattctgtcgcgatgtcaacctcacgacaaaggagctttacattaccattaaagctctgaatcgatccggtcagatgagtaaccatgaacgcaatgagaagctcttaatctcggactgcttgggcgtggaagcgtatatcatagacatcatatatttacacacctattcataatctgataatttatccaagctaattgatgctcagacacaaaacatgttggagaaagacaacagcaccgactcttgcattcttggccctttctatacggccaatcccccacgctaggagaatggggacagtattatccagaagtacttagggggcgaagtgacattcttccacagtcgaattcttgatgccgataccagtttgcccgtggcaggtacgtctggctcaactcggatttacctttgacatctataatttgctaagtaaaacgccaggggcttctctgaacgtgtggcagtgcgcggtcaacgggttgtatgaccaacaagacccagatcagccgtcggggaacatgcgcggccttttcacatccgatgcaaacggccaatatgcattttactgcatcaagccggttccctatcccgttccctacgacggacccgcaggcgatattctcaaactgatggatcgccacccttaccgagcccacattcacttcctggtcacgagcgactcttacaatcgcttgatcacacaagtatttcccgatgatgacacttatctcgactccgactcggtatatgcagtcaagtcagatttgcttcttcaattcaagccttacacctcagactcaccgcgaagtaaggggggcaaagaagcgaatgtgcaatgggaagtcaattgggattttagaatcaagcagaaaaaggtgtgataggaatgaattatcgtattcctacgaatcagtcgtccgaccttagcggttgggttgtaccttatttgatatagcaaagaaagcacgttcgccgaaatcttgttcaaatctcttatatatccagtaacaaaaaatacattaaagtatcggcccaacaaaaagttgcttttcatctggagtacaggagtctgcaaccgccagtacagcgcgctatttcgagttttgcctgcaggataagcattcatacatctgaataaattcatataactcaattcaattcaaagaccatgtataaaacggtcctctgtacagttaatgctttttgccgcctttatatacatctgagaatagacttaaggccgcataattggccgaatatatgtttagagtattatgaggatgtgaaccctatgaattaagtatcttttatatgtcatataaaggatacttaggcaccatatattttctccctcgaagtagtacggagtacaaacacataccatgagtctagcttaattattgctaatgaatcacttttcctttcttatgcttaaaattaatcaccgaagtttgatccctgagtgcctgaccatcccaagcgttgtaaaaattcaatatgctgcctaagtattctttgtattggcaagtcatacaaaagatacctaattgatctatctgcggtttggtggagcacctgaccgggaccagcctttgatgacgtgacgtacgaaagacggaaagaggggcctgtcatttttttctatcgtctttctttctcaacggtgttagcacaacaagctcctcccgaattgcatgtccgaatgaaaccggaatcccccaaaacaacccttgaattattatgtgaaaatgttaaacaaagttaatattccacgtctaagacgcgaaaggcgtgcgagtgagggacgaggacgaactgcgcgggcctgcgacacatgccgccagcgcaaaatgaaatgtgatggcaaaaagcctgtatgcgcccagtgccatgctcagggtctaacgacatgcgattattctgaggcgaagctcgttagagagcggaagcagctagagttggctcaactgaaaattggagcctacgaggacttgcttcggaatatcgctcaaagagcggacacctctactgcgaaacaaattacaagcacccttgaagtacatttttgtcgcgtgtcattgcgtggtcacccactaatcagatccggtgaatgagtataggcctatacaacagggagcgaacaccggaattgttcttcaaatgtttcattttcgtctatcgattctctggacaatattgatacggtgggtgaagacctcaatcgcagcaaagaaagtagggctacaggatacatggggaaggattctgaaattgcgtggatgcaacggctggagtcgaatactacaagccagagcgacaacccggattctttagaaaaaccattgaaagaatggcctcctgttaatgactccatcgtcccagtgaactatcgtcttgaccatcatcatttgtccgaccccgaagtgaggaatgctttcgtcctaccaccgaaagcgctggcagatcatctactccaaatttatcgcactaacgtcgacatttctttcccaatcatccgatggggattattcatggatcagtatcgccgcctattctcagggagcttgataaatcccgggaggaggtggttggctgtctttaacatggtccttgctattggcaggaacttttgccgagtctccaaacaagatctgcaggtttacgccgatgacgacgtgttctttgctcgagcgaaatccctgaacatttcggagactgttctctttggctacgaagatctgcaacaagtgcaggtcgagacgcttatgacgttatacttcctaactgtttctcgggttaacaggtatgacccccaaaattgtgttagaagggaattctttcccgtgtgttgtatgttatgcatttctaacgaactcatatatcttggaaaatggtaggaatcgccgcgcgctcaggcatcgcattaggactcaatattcgaagaacgaacaacatatttgatgcggaagcaaccgaagcgcggaagcggctatggtggtcgatcttttacctggaacatctgctctctgccatgactggccgagcctcttgccttggagatggttcctgctctgcacctccaccgctaccctttgaacactcggaatatgagttttctgatgtcggtcagtggggtgatggccgattagctcatgccggcgatatgcaatggacgatcttccagagcgacgaacagatcgaagcccaacatacgtccttgaagtctatgcagcccagcgcgtctctctacttcttctatctggtagacctcgcttttatcacgcactccattaccaatcgggagcacagtacgagcatctttcgagatggttggattcagatcgaaagccgcattgagatttacactcaaaagctagatcaatgggtatctggcttacacgcttccttggcttttgaagacaagcatggtaatcaacaccccaggagcagatcatattatcaggtctcgttagcattgcactattacagcgctcgtgttgtcctcaatcggcattgtcttacacgcccagaaaccgctggaaagagcggcatcaatcttccacgatcccagttttacgacaaaacctcttcggcctttcttcgtgcatctttggcgctcatcgctgttctaccagatcaaccagatacggtttgggcctacaatgtcgccccatggtgggggttcctgcattttctaatgcaagccactatagcctgccttatacatttttcggttctctcagtgccagcgagtgtcgagactgaggaaggcgctcccgggtctgtggaaacgcctgaagttgttcttgctgcgacgaaaaaagcgctccactggctgtattgccttgggaaatctgatgaggccgctcgtcgagcttttctgctttgcaacaattgcattcgccgtatagcctctagcaaaggcctggatttgagtggtatgccctccacgattgatttatccgagacgtccagcgttgcccaatctacggagtcggatataccaagagagataagcaactcgaggttgcaacaagatcagggtagcgaatcaatggcctctcagggagttcttgacgatgaaggaaaggaagatacactgtttcaagagtccgaagagccacgaaaatctcgagacatcgtacggagcctttccgccgtgcttgacactgatatcgccatgtcagagtggatttcggacccgaccgacgcaaattttgaagagttattattagtgatgatcgggcccaacgtatagttgcgctctcccatggaatgtgggctataatgagtaacttgttcaactgggtaaatttggcatgttgttattcgcaccatacagatcacatgatacccatattagataaccaatctaatttattacataatcagtgtcgggcaccgcaaaataggtacgcatatgacgtcatatacgtggaagcacatgttaaattcaacaaaaggaccaaatttgttgggccgtatctgatttcaactcttataccatagatgtcgttctctacatcgctctgcttttctctaatgtcacctcatattatgtaggcacgtcatcaacaacatgattggaacatctactgccgagtacttgttcattcggctttgcatcctatttcttcacaacatcgcaccaatcagtattttatacagcgttcaattactcgtcgctcaattctttcatctaccaacttatttcgaacgcatacccttggctatccaaatttggctcattgcagaagccgtctttttcacatttgtctacataccacttacatacgcccttcgcaattctcctatctaccacaaacctttgtccacagagctcagagaacatctgtttcggagctgcaataagaatgtgcccaatgtggagaaatacctcagccaatggcttatggtctcagaagctgaatgcataaagcgcgataatgtgaaagactttatcagatggtcattattcggacctgaccatattctcgagcaagaccagcagcatgaagaggaaatcgagacctacacagtagaaattgagaagctgattggacgaaaattgtcaccgggcaggatggatgtgaaaggcctaggacggcttttgaatgaagcagggggttcacatcgaagtctgctatggtacagtgttagtactcgcttcctcctctctatgtgtggtatagccattttgaactgacattccaattaacttagtgcatttccgtggttgataccataacgtactgcaggatgttatacaatggattccacttctatcgcaattcgttctcgcgattctttaccgtctttccatttcgccctgtcacaatattcacgtcttaccgatcaccggtgcggcatctcacatactggcatcgacgacatacatccaagacacagctacccgtactattcatacatggtatcgggattggcatgtacccttacgcaggcttcctgcgagagttaaacgagcaactacaggcagacgccaccgacgatggtgagatcggcatcatcgcacttgaaatcatggcagtaagctctcggataaccaatcctgctctcgaaaaggaggtgatgatttctgagatcatggaaatcatgcggtatcacggatgggacaagatcgtgcttgtgtctcattcttatggttccgtaatcgctacacaccttctcaagtctgatcggttcgctccgctcatcgggcctgcggtcttcattgatccggtgtcattccttctccatctgcctgacgtggcatacaacttcatagcccgccaaccagcgcgggccaatgaatatcagctatggtatttcggaagtcaagacattggagttgcgcatacgttagcaaggagattctcttgggttgacaatattatttggaaggaggagctcggggtgaaggtggaaaaagatcaaaagggtagaaatgttacagttgttttgagtggtaaagatttgattgtggacaccgaaaccgtggggcagtacttgatgggttcatcagaggtctggacagttgacaaggaagcagcacaagcatggaaaatcaggccctggattgggtgcggacttgagacgctgtggtttgaagacttggatcatgctcaggtttttgattctgagactaccaggcggccggtcatcaaggcgatctctgtatactcaaagaccgactgacactgttctgttcgtgtgtcatgtcagtccatgattacgacattttcacgaagtttcttgtgatacaccggtttaagatgcgaatatgcccaatactacctcttagttcaagaacaatagataagtatacttgtccctgtcgtatatcaagggacctaactacaaattaggtagcgaaattgataaggtacaggattccatcatgttggtactcatgcgattgactaggggtttagataatgcaagtattcagacagacgttgctaatgtatccgaggtatatagcttatacttttcttttgctatgcggaattgagatgttgagtcgaatacacattatcattgaataaaaaacataaaaaacataaacaactggatactccaggtccttttttccaactcaagatcaccccaactcaacctttccctccgtcccagcaccccaagccaaaaacccactcgcattgaacgccctcctgctctccacaacactcttcaagtactcaaaatcccaacaccgtctcgcaaacccgccccccaaaaacccatgctccttatccactgccggctcaagcgtactatccgctgaacaggtaatagcctgggcaaggtaatcaaagcagtgcgctacatggacagagcggttccggccgaagtcgaagcgttgtagctcgggtgtggtggtgtaataggctcgccggaggaggtagaggcagtggagttggtggaaggcggaaggaattaccacagaagaggactttgacctcgaggtatctgcggttgaggggatgaagtagcccaggccgtctgcggattctgttattactatatcttatagtaggtgatgagatgaggtgattgaaagagaaataagaacctactgggtattaaagtatcccatgtcggctccgagacgttcccttcaagcggtggttcctttgagaagggggattgatacgtgaattcacctgctatttggcggaggggcaggtgaggtgctatagatatgttttctggagtcccggattcatagctgtgcgtcgttgttgcattggagatgtatatggtgaataatactccggttatgaatgccgtgataaaagagaagacgaagaatatgatgtgtgcgactgtaagttgtctgtttagtggttttctgagatgaggttgaggctcctcttctccgtctaagtcttccttcgcgtttgagaggggcttatactcttgtgcttttgcagtcaacatggttgtacgatgaactaggagcatgtaaaaaaaaggtgaattcacagcttgaggacgctaaagtcgaaggaaacattagtacctgaacgaacccctgtgcgcttatgacgcatacagcaatgcatggtcccctttagtaataaaatcaaaaagccgcatcattatggtatgtaaagttaagttacttgagccagaaactatacgtacaatcaaaaagtcgtgaatgtattctaaactgcccagagagactaagagactacgtacaacatatcaccaaaaggcatgaagctaaaagtaaaacgctatgtgggctaccgttgttgatatatcaagttctatctatcacattctctatgctttttcggatcaccgactcgtttgtgaatcagttacgttattcgatggtggcctgcatatctagcccagtttgaaataggatggtacagagtaatgctgtaagatatcgcgcgtaatacttgacccaatatcaaatacagtgttgatctacgtatctcttagcattctagtacttttgatcacctttgcaatgatataagagctgagggggtgtaagcatactttacataccttttgagtgtatgactactattttgctgctgacctgcaggtaagagaggggttggatgcacgtatcctgcaatgtcagctcgagcgaggacgcatgccaatgcatatgcacctgttagtctatttggaggtggcttgccggtaataccagtaccaataaccagcattaatcgattaccagcatatagaatattgtatgcgtttgtaagagatactatatttattacctgtggcttatgtatgaaagttgggttctcgcccgagttggcatggcagggtagacgccctagactggacgatcagcattcatccaggttggacttggaagtatgtggtactattcattcatagtaaacaaattgttatattaatagtatccctttcctcttgttgaataagcatctcacagcgccagctttccaacttccatcaacatcatctttgacatctctatcctccactttacaacaacaaaagagagctcagccactcataatgcatgtatacctcctcgtcattgccttcctaggcgccatggcattgggtgcacccgcacccactgagagtaagtatcacaagcagagacaccctactgttggactaggctgacacatgctatcaagccgctgcggttgtcagacccgtcaaggttgccaaagaggacaatagagatagcaagacagatagcaacgggaagaatgtgtttttcgcagatgggttctagagggggtttctctggaaaagccagaagttgtatcttcaaactatacttgggattcgcaagatgtcgttctcgatcgttagtttattatggggccaatcctagtcctaggtctacatacaagagatcttctctcttctctcaaacacaaccgtactacttctatacctccccagccagccctgtcgcaatcgactcttcaggtaacccgaccaagatctcctcctcgggtacatacccctcatcaaccacgtagccactcccctctggacaatgcataaaccttttcaacccagtctcatcctccggcttctcaggccgtctataacaagacgtatgagctttcgcccaattttccaactccccccagttccgacaaacccgattctgcccaactccactaacaacctcgacccttctctccgtagcccgaggtgtatcatccgcatcacatataatctgtcgcctcagcgcatcaagacaatgcgcgatatggtgccaggttctcgtctgtgtctggccttcccgaaactcgaaaaggctgatatagatgatcttaagacagtgcagattgtggaagccatggaggatgtagattcctttgctggtgtcccagggaaagcgctgcgctgtgcggaggttgtgggatgtagcgaaggagtctgggagggcaacaacgccgctgtcgatgtttatggagtgccatagggtatccgcaagggtggtatttggggaggagtaatcggttaggaggacgtagggctctgtgtgagtgaggtggaggtcggcgtattttgaatgagttctatagggttcggggtttgcggcgatgatggagatggtgattatattggtgataagagatagaagcagtataggaattaggaagaggaatcgctgcctgtaggggttcgagtttccagggccatctgcagagatgtttggatcctggctcgtcttgtcaatattgttgagaagaccggcgaattcttccctattctcagatggtgtcgtcctcatggtaggcagatagactcttccataattttttacttgaatcggagggtcataagactagagtcggattgacataatttctcacaccgaaattctgtagtccaaccaagtcaaacgatgtacacccctgcattcatcacgcccgcctgcagcggttactcgaaaatcttgccttaacatattccaaatcaaaccacctggattttcgcccctctaggagtcagacacttagctgcaagtcacctagtcgagtaagaatagcgagctactagtggtcatgcatgcatccctggtattcgtacgacctgcggctatcccttagctggccagtgatcgttttaattatcaactcggttgccttcactaaccagacttattcatctttaatattgagatgtattccgatattagcatctactatactatacaaaaattccagcccaagcgcattttgatgcaagacgtttagcgatggaataccaccgcgccctcctccacgtcaacgaccgcacagggttaatagttatgacatcgatatttttcctgacagggatattcgcggtatcactccgcttctactccagacgactctcaaaagtcccactaggacttgatgactggtttgctttgtcttctcttgtgggtccatctcgaaccccaaagacttacagcgacggtatactgatatagagatgagcagttcttcgtcctcgccttaaacggaatcttcctctcaggcgtaatacaaggtgcaataaccggtcactctatagttctcaataactggccccagcccagcgcgctcgaagtcctagtccagaaatacaaatatgctttccagacaacagagaagatcgcctttgggctgataaaaacttccattttactgctatggaagcggatgctaagtcccattcgctctttccagctgttgtgctgggttatgattgggattgttgctgcttggagtatatctttcttcttcgcgaccttgtttcaatgcggaacgcactgggactggaattgggcgccgatcgggttttttctaacagagtgtacggatacgctgaatatgctgactgttttttgtgggacggatgtcctgacggattttgtgatcatgttgatgcctgtgccgatcatttggaagttgaagatgtcggtcaagaagaagattggggtcacgagtgtgtttatggttggtatattgtatgttctttctcatctcatccagtagagagttagcgtgagattccagatgctaactttcgttctcacagcacgatcggcgcaggagttgcgaggacatatatctatctcgtgacatcctatgataaagaggataaccttgatttcattgccgacttcacgctgtttatcctgtggtcggaaatcgaggtcaatgtggctatgattgtttgctgcatgccagtctttggacctgttcttggtcaatgtcgtgacactctgtaccgccgttttggtcggtcaaaggatggcaagttcggtctccttgggccttcgacatcggaatcgacaaatgacggcaagacacgcctcgccagtttcagcgcttcgaacagatcctatccacattatgagtagggttgctgcgaagcaaaactcgatgtctctggtggataatgttcgaacataaagttatgctagcgttatactagctaaagccaggaggattcaatattaaagggagatctacgtccggaataatactgtatctcctattactatgttgtacatagtccatgggtctttttggattttagtttaatgattattatgcacgtttttgttaatttcctgactaaagagtaagaccggctgaaatagaagaagcaggcaaccaactatgtagcttcgaacccttccggctgatcggcagaatatcacagtagctatccgacaacaaaccgcttcaggtatatgctctgtaggaaagaagggaatgtataattgactcagtctggtgcagctccgtagcaaataaagcaagcgaagtggcaataaaaaaaagtaaacatcatccttaccagatagcccccaacggcacctcaccgactctttaaatttccttctcacattcttcctcatccatcatcaggcttttaaggggctcagacctcgcataatcgaaaaaatcatttcagcagtcatggctaaccgcttgtttgcatccgtggtagccgttattctggcaatcagcgcaatctactaccaggaacttttggatacgatttatccaagtgacaaaataaaagtggtggacaccacgcgagatatcacttaccttggcagtctatcccctgctggaattgaacatttccaaaacattttctatgcagaggaacccacgggactgcgacgtttcgcagcgccggttccaacgagaccagtgaaagggtctatcatcgacgccacccaggctggtgcctggtgtccacaaggaacgggagatatactcccgttcacgagtagtgtgaccaacatcagcgaaaattgtctgagcttgagaattgcgagaccggcaggaacgcagaaagatgctaagtttccagttgcgctttggattcatggaggtgagtttactgtttgtgaagacatgagcgctgaagacactaatgagtagacaggtggccatgctttaggctcagcttccgatatcctttacgagcctgatggcttggtaaagctggctgctgctgatgggctcccgctggtatatgttggcataaattatcgcctgggctgtaagttatatatcaagagtctttgaaactctgtgccgaggcttacttccggtttagtatttggcttcgcaactagtcgagcattgattgagaggaaagacacaaatgcagggcttcgggatcagcgcgctgctttggagtgtatgtatctcggtgctctttgatcgcgaaatgatcacgaatgctgagaaaccgaacaatcaggggtccgcaataacatcgagtcattcggcggtgaccctaatagaggtatactcacttctatttcccgggttcaagcaccaatatactaatagattttcttctagtgaccgtcattggacaaagcgtcggggctagtgacatcggtctgcagctaacggcctttggaggtgatcaagatgttccatttcagcaagcagtgtaagtgagtcgagccttgaaactgtttcaatgctgattcgcggccttagaatgatgtctggaggtccgggactgaacttcaacagccaaccagacctagttgcaagcaacacggctgctgttgcacagcaagtaggatgtgctagtgacaacgatttgcagacactcgaatgtcttcgaggggttccctttgaacaactaaccaacctatcggttactgcatctcgggcagcccgtccgcctttcggtgaagcttatttttacccaacgatcgacaatgacttcattcaagatagaccctcgcagttgatacgtgcaggaaagttcaccaagggaatacccctgatagcttcctgggtcacaaatgatggcgcttggtatgcgccgccgacaactgcgacggacgacgaagtcctagggagttttggactatggctgcacaaactttcaacatccacgaaagagaaactcctacagctgtatcctctagaggacttcaagcacatgatcaagtcagagcatgaaggtcaaatttcaccgcagtactatcgcgctgcacagctgaaccgcgacatctggttcacttgccctgtccttgactttacatggcagtacgtcaaaaatgggggtgtggcagcctcccaagtgcggctgtacgaattcaacgaaaccagatacgcgccagtctttgattccatgggtgtgtcaatgtggggtgtcgctcatctcagcgatatcccttacctattctacaatgacgacctacgggccggtgcagataactcggacccacagcttgcgttggctcgggattttagccggaagattattcggtttgtgcatggcagttctaaagaggcggacgatgaacttcagtcctggccgcctgctttctcggatgacttttcaaaaggttcattaagcgatatgcctagtcatatctcattgcagctgtttggtggccctcatggatcagtgcctactacatgtagcgaagacattggggctgatattgaggcccttaccgacgcagagaaagcgcttcattgggaaaagttgttcagtcgctgtgcatttctcaatgggcagcaatttagagaggaagccggggtgtgatgaaaacatgttatttggggtgcagactgccaacttactcgcgcagcccccgctacttagggagaatatttaggagtcattttgatttgaagctatcaaaatcacgtcgaattccttccatggtgcttgatgaacacacgattaaataccatgccctggtcggtcataaagaagccaccaagggtaccgtcccgtatatacccactcaaggtccacagccccgacaattgtaaggtctttctcgctttttatcagctcttctatgccagcgagcggataggctcagaataaacagtcgttggcgttggcagacctccaattcggtcaaaactgatctcagaatcaccgctaacctgccatattcgtacaggagatggaccacgacgcggattctgcatatcttcaaaatcttgcattaaagatattataccgtccgagttaatcactctttcaatttatcgtagactgctttctcattccaaaattattcctcccaattattcttttgctgcttgacaatgagtgatgtgacggtctagggaattgagtgtcgatatgagcccgggtcaagtgtgaagcgataaactgtacggcgttcatctcaaagctgcacattggttgcataaattggatgattattcaagtagattatctgaggcgatgagcttaatcaagacttctcttaaagtatgtttacctattactggctgtcgacacttttctctcttgagtcttcgaaggggtatttgctaggtggatagttaaggaaatctatatatggtgtagtgggggaccttgtcttccactacgtattgaccttgcctgtcctctctttattaagtggcttcattacgtaaccctggagtgatggaggatatatgtagaagatagagacagattgaatgtacacacctctacacctctctgagttgacttcttgggcagcgggcctgggttcctttgtatgcacagtcgggtatgaaactgaactgcgagtgctgaatcgacctgtatgccttagagtatacagccttgagcgttcccctctttaatggctaaacaaaataataaaagtatcttcctcgaccaggctgcgattaatgagaggaactagatggtcgtaagtgtcgtccgttgcccgtacactcgttgcacttaaatacattatgcattgaaggaaaggctcttatggatctatgaacccaagttatctatttaaaatgatagtaatgtttccttcgactggtttatccctatattccccttgaatctctccaagagcagatagttcccgttgcagtttttccggaagccatattttcgatagttgaacagactggatttacaaatgcgcgttcaaaaccctttggatatccgcatatgtgacccaacagcgtcgaagttcaaaatgacggagaacaggaaggtggatgttcgacaggaaatcaatcaaaacgggactgtcatctagacacagtgtttcgatatttcgtagtgcctctgccattctgtctcggagactacgatgacagacccttatctgagcgtagaacacagatatctggaaacatctaatcacaataccgttctctttggccacaaccatagcgtcgatgattgtttcgaggtgtgtcagaaatgagtagtccaatcatcaaagactcgaggtgcgaaccagagaaatgtgacccaaggggacttagcaggcagcatacattgctcctgtccagtctacagtcccctacgcacccaggatgggtgctctacgcaccatgacaggtaccatacttcaggcatcagcggggtcgtgacagttaataaaggtgtggtattcctaggttttattcctatagaaaggtttaacgtttgtaggctctcgcggtatataaatataatatttttctattacttatagtgacgggaaaatggtggtaaggcgaatgtatatgtggcagaaaaatctcaataaaatctctaactctctaaaatgacaaatgtccaggaaaaatgacaatcttgtgaacaacttagtaatcaaagacaaacaaaacaaaatgaaaggatgttttcggccgaaaaccgtggacttggtttttcggcggaaaaaacaaatgcgcctgtcacgtgatccatccgtaacaaggatgaaacattacagtatccagcacagattccgacagagaggaatctattgtcctcttgctatgcttcatgatattgttgcatatgcaaggtttaagacgaccaaagcccccatttctgcgagtcttctagggtctggcccttcccccggttggtacgtagtagaggacccaacaccgtcttggttgaaactcaagccgctggtccccggaagttgggtagttgcaaggcctgccggattgcacatctccatccgcagctgcatgatccatcgtttgagtgatatattcgctctcccagcatcgaaatagaaatctatcaaggatgactgacccctggtaggatcggaacagatctctggccagttgatcgaacgccgcgcatttgaatccggctgtgcatccggctgcccgcgttctatatataggtcatcttgcaaaatgatctctcttccacggtaaccaagactagacaattggacaaactgcagcttggggctatctgccaacaattcgaagcttcgcttccagagttcctggatcttattgataacttcgagagatagcgaagaaccccaactactcctctcttctgtgagggggcctggatcttgtgctccgattatcgcatctgtcaagctgacattcttcatactcagtcgccttaaggttggcgctgctgtctgaagaaagcgcttgagattccccactgtcagctcaatggaatgaagatgaagttcttctagctgggaaaaccggatattctgggagagatcctgaaaatagagaggagacaattcttccaagggactccattgagcgaaggtcagaacctttaatttgggtgcgactgtgaccagtatactaagaagatgtttgaaggcgtcttcatcgaatgtatcgttttcgttatctttaatgcgaatgcacatatgtagagtcgtaagatcggtcaagagcgatagcagtgattgatactgtgactctgacagttttatagaccccaacttcatgccacatgcgatattgccgcacgtatggagggcgcggaccttgtggctagatttgattatagccttgaccatttgtgaaaatgctaaggccagaggcatagataacatcttccgctggaaacttgtaaatgttaaatgaacacttatatcatcgttgttgaactggttcttcagttcacgtaagccaaggcagcgaaatgaacgatagtttgcttccaggagaaattcaatggggtaacaccgtaagccgactgtggtggcgttttcgaggcgcggtaggcatttttcaagaaccgcagtaagttccgagtcgagaatagcacgatgttcttctagtgcagcttgataagaggtgaatagagcgtcaagctcagccttagcctcagttttattgaatggtggttcttccttttcaccgcgcattattctgaagatgcttctctgttgccggagcgccaatcccggacttctgaaacgttccttattcttttctggccacccctcgaacaagtttgggatgatccgaatttctcgaaccgagcctcgtaaggtttcactttctgcaatatcctccagattgtcaaggctttcacgggtgagaagaagtgataaaattttgaagtagcgcgttgcataggctagcttagttgttaaagttatagactaggtactcggcttaccgagaacggtagtctgtaggtaactttgtgttcaaccgaagacacaatatatagagctgctatcgaatcaaattgtaaggcaaattatagttttattacaataacccagccattgttaccaaggaatacagttgaagtagcgcgttgcataagcttccagtgtactgccatgtatttggtggcaagtgattctgagcgcaccccactcctgaggctccagatattcacaaatatgagacaatatctctggaggcaggattgtgatagacattttgtatgaatagtcacgtgaatggttagggatggggttggaaagtggaagagataattagaggaggtggcggcgtttgcagatttgaaggtagcgggagggtagcggcgggtaggtagaaggtagcagccctaatcttaggccccgtggtagacttctattcatatatttttggaaatgaagctaaacgagacatgagagcacttaatgtatctatctgacgctattactatctaggggcagagatcacccgacccaatggtaacgatgagatataagccatcttaccatcccacccacggctagtctattgttctgagctatctatagccctctatcgcacttaggctgatacatacgaccatagggtgtggaaaacagggcttcccgtccgctcagccgtacttannnnnnnnnnnnnnnnnnnnnnnnnnnnnnnnnnnnnnnnnnnnnnnnnnnnnnnnnnnnnnnnnnnnnnnnnnnnnnnnnnnnnnnnnnnnnnnnnnnnnnnnnnnnnnnnnnnnnnnnnnnnnnnnnnnnnnnnnnnnnnnnnnnnnnnnnnnnnnnnnnnnnnnnnnnnnnnnnnnnnnnnnnnnnnnnnnnnnnnnnnnnnnnnnnnnnnnnnnnnnnnnnnnnnnnnnnnnnnnnnnnnnnnnnnnnnnnnnnnnnnnnnnnnnnnnnnnnnnnnnnnnnnnnnnnnnnnnnnnnnnnnnnnnnnnnnnnnnnnnnnnnnnnnnnnnnnnnnnnnnnnnnnnnnnnnnnnnnnnnnnnnnnnnnnnnnnnnnnnnnnnnnnnnnnnnnnnnnnnnnnnnnnnnnnnnnnnnnnnnnnnnnnnnnnnnnnnnnnnnnnnnnnnnnnnnnnnnnnnnnnnnnnnnnnnnnnnnnnnnnnnnnnnnnnnnnnnnnnnnnnnnnnnnnnnnnnnnnnnnnnnnnnnnnnnnnnnnnnnnnnnnnnnnnnnnnnnnnnnnnnnnnnnnnnnnnnnnnnnnnnnnnnnnnnnnnnnnnnnnnnnnnnnnnnnnnnnnnnnnnnnnnnnnnnnnnnnnnnncgccggtgagttagtagttgggtgggtgaccaccagcgaatcctcactgttgtatgttttttatttttatttttaatattcgttcggaagccaaacgctttgcttcaccggctcttcacgccgatcaaatcaacacaaggcgctctggactatcctagacaatgcgtgtgacggaaggtcatcattgttcttgcgagctggtcatcattgtcacgattggcacttgcggaactcgttccttcccgtccgagagaacacgtttgcacaagcagtcgtaccttccttccagaataagcgaggatagggatttgcccccaaaggagtataaagaccccattgttgcttcacgtttgttttgttttctttttcttcttcatacttgatattcagttagaaatgcacttcttctattagaaagagcctggcacataacaatcatcaactgtccactagcccttttttgatgccactccagagaaatgtactttcccctggacaaacccaataatctattgagaattaggatataaaagaaaagctcgccatatttgggcgaatagaattgaatactcacaaggcaaccgaggctccagatatcaaccttcttatcctaatgggtaccgattgtgaattctggtgctcgtaaagctggagattgaatcgtatccgatgggtgattgtctgaacaagaagctaaaaccattgtaattatcgcccacaaagatgataagactagttatatatacaattaccgaagtcaactattctgatatgcggctcacgtatctccgagatgagcggcgtcctgatgacctcccggagtggccttgtaatactatacttattattgacccgtataggaacttcagatagatatttctcaatagtttgttccggattttctagctcgagtagtatattcgtaggtgtgatgtgccaggtctgaaagagtgcattgaatacagaataactaagatagagagaggaaggaagcaagttgtaaagtgggagacagctagttcttatagctgtgtcctgaccgttttgccaacaatgcaaacttcctatctagcaaacaatctagctaagaaaactagtaaataagcaatgtaaacgtcgaatacaaagcaaatatgctgtccattcggcccttcatgtttgaaatgatccagaaggggtaatacgtagtgccgacctccatggttgcttttcccagagatatcggatgatttctcgaggatttatcgctcaaaaatgtcgtgcgagctaccgtggcaatccgctattagtattttgagagccacatacctctgaacccttcagtacttggtaagctgtatatttaataaatatggaaaaccatactcacttggattccctagctaaccaaacggtagaatattgtccgtagcctagtttcctcaccactttgtatgtgccagagttgaaagtatctccaagcgaaacgggatggaagcctccagtagaatgaaagtctgcctcttctgttgtttgtttcactggatggagagatcttgatattggagaaacatattcaaaaacttttgcgagccaagcttgagaaattactcaagccaaagctttattgaatgcagtaatcatcttgagatgttatttgcaggtcttgtgtttttggaacctttggaacgctcgtcggacaaattatgaatgatcaaggtcaggaggtctagaaattaggtatgattttctagttcttattgtgccgcaccggccgtattagactgcagtgatacagatatttgcgaattaattggttgaattacgattctcactagcactagcggccaaattttcactacacattgtatttgagggccatagataagaattagttttgtcgtagtggtccgatccctcgcctataacggatcctcccataaatacatcgaatggtcatgcctcgttaagcttgatttttaaaatgttattatggtccacaacggggtctgtgttattgttacaccgaacaaaaatagagaaaaacatacaacagtgaggattcgctggtggtcacccacccaactactaactcaccggcgnnnnnnnnnnnnnnnnnnnnnnnnnnnnnnnnnnnnnnnnnnnnnnnnnnnnnnnnnnnnnnnnnnnnnnnnnnnnnnnnnnnnnnnnnnnnnnnnnnnnnnnnnnnnnnnnnnnnnnnnnnnnnnnnnnnnnnnnnnnnnnnnnnnnnnnnnnnnnnnnnnnnnnnnnnnnnnnnnnnnnnnnnnnnnnnnnnnnnnnnnnnnnnnnnnnnnnnnnnnnnnnnnnnnnnnnnnnnnnnnnnnnnnnnnnnnnnnnnnnnnnnnnnnnnnnnnnnnnnnnnnnnnnnnnnnnnnnnnnnnnnnnnnnnnnnnnnnnnnnnnnnnnnnnnnnnnnnnnnnnnnnnnnnnnnnnnnnnnnnnnnnnnnnnnnnnnnnnnnnnnnnnnnnnnnnnnnnnnnnnnnnnnnnnnnnnnnnnnaagtacggctgagcggacgggaagccctgttttccacaccctatggtcgtatgtatttgttacagcattagagggaatcatatagcaagataattggggttaaaagactgactgcaagaataacagaattggggtgaacaacggcagaatatcattggatcgtgttgtttcccttgaaacgctctgcatcttggcatctacacataactagaactggaatcattatacggagtacacgataggcagtactccttacaagctttttgaaacatattcgaaaatcccatccggcttgggaacagcggacttgacattctggatctctgtccccagacagacaagcacatcaaagagcttctgtggctccaattcgctcctagtgtgttctgccaccaggccgatgaacctcttaagctcatctccaaatcctttctgctctaggccaactacgacatatcgaagctcaggtacatttgccatggatgcggcgtaccactggattatcgctttaacctgtctatttccgccaaaagcgccgcagccctagagtctagtggtgacaaaggagtagggcttccggacattcctgtaacaatgcgaggagaacgaggtgtaggccttcaccaattcccgatatagacaggctagtatcaggtccggaatgctcactccactatgtgcatgaccgctgtctacaaggttcaattccagggcgtccatgaatagcatgacccggtttcgccagtcagcagacgagggtattgctgatttctgctaggcagtattgaccaatagtaattaagtcacccatggcggctggaggcctccataaggcataaaggtggctttgcatgagtctgcagtaatgttgtacaagcacaagatgtctaggacttcgagttggacagggaagaggggaggctggaagtaaatgctagtccgcatatagacaaccgtgtttcaggtcgtcagtgatttcgaatatggctctatcttgttcgtggagataattttcatcaatgtacgcctctctacgacagtatgatttaaatctgtttatgtagtgactgcccaaagagctcttggggtttcgccctatagctgtcttattgtaaaagggactaagttgtgaaaggacctggtataataatcttcctatatgtccaaactggtatataaattgtatattgcgagcatagcgttcttccctataactcactagaagatgccctatccttctcacgcttcccgggtcgattagctgacagtattgactgtgcataacgagggactttagtataccacattctatagtcgtatgtattcaatctagcactagagagaattatagaataaattaaattcaaactcaatatgtttaggtaatatccaaacctcgaatcaattatcgccagaatattggcacccactggtcataatctccttcttttccaaattccaccgcctgcgagtccttccttaatagatagagctccgcctcgtctcgcaatttcctcgcctcgtcgttatcatacgaatcctgaagcagtgcttcggacagcttgaaaagcccccgcgcatgctcaacaggcattatgtcggcatggaacttggtaatctcgagagattcacgcagatgtttgctgcagtgaaaatcaattagactggtcccgaggggaaatacgatagctcagtgtatagatagtccggggacaaattttagaagatgaaggggaaatggggagaggagataaaaagaaggaacgttcacctacacagctgcctccactttcccctgatcaagacataccacccccgttttgtataagcatccggcgttgaaaggatgcaattttgtctggtcccctttaagccacagattatgtgcctcgataaaatttgcttctgccgcctcgaagctatttcttcgacgctcaagcagtcccaagacaaagtatgcgctgtggggacgggtcagcaacgaacatctcttgtaaacacccttgtgtaggcaagcagagacctactaagccagcattgcccagttaagcggtagttcctgcttgaactcggtgattgaaatgtcaagcaattcttgcgccttgtcatattgaccaagatacatcaaacacctggccatattcttcttcgtcaccgtcggccaacaaattcccctcccctccttgacattccaggcaatccatgtatccttcgacttttcaaaccatatcaaggccatctcatgattattggccgtgttataattgtaagccaggttctgctcaaatccgccgagaagtccgcctttcaacggaatttcatgcaatcgcatttcgtaacccttggtgttgagctcaattgcattttgcacctttcccgtgctctcgtacatgctggcttgaagggatagcgtccaagcggcgatatcagtggccttttctttatcctcaagtgcttccacagccagcatattcacttcacacacgtcttcaagatccttgagtgcgttgatctcgtagagatatctggactggtcactatgtgactttcaaatcaatgcaaaatatcagacacgcttacctctgacaatccttaagaagctcacaaaatagcgatgataccctgaaattcttcgagactcgccgctcttccttgaacttatccacaagactgagaacgtgttgaaggcaacgattgcacccagtccactctagatatagttggttctgattagctccatcggactgcttgggaaacgcacgatacacgatcgcggttgcgttggcgaaagctttctgtcgctcatcaagagagaggaaatatctaaattgagtctgcaccatccgatggcaagaaaatacacgagcatctctgtcacgtttgatcaaagcaagggtaaggaggggctctgttgcctccgagaaactgcgctccaattaggttgagggtgcttccaagatagggctcctcatacctgaactcgtcggtacaaaactcaagatcttctggcagatcgctatcttcagcaagatcaaagagcagctgtggaattttctcagataccaagaatgacgcaattcctaagaatacccggctatccttccccagagtggcaaatgagagatcccacacagcctgtagctcagattggtgagcccgttttgggttcttcaaatagatttgcatgaattcagcaatagaccacgatcggcgatgaatcaatccggccatgtgcgagatggccaatgcatgaccactcagtttctgggaaagttcaattgccgaatcaccctccacttggatgtcactacctatattgcgtttcaacaggaatagcagaaactcggagcccattttcgcgtcccatgaggttatttccagaccagaagtggcaggctcgtatgccaaagaatggttgcgggtggtgataattgcctttccatgactggcctccggccagtatggcatcaatagatcggcagactcgacattgtcgtagaccactagccatctacagtctttctcatgtaatcaataagcaccaatagaaaacccttatagatgctctcgaggagtgacttaccagtcgtctggaaccaattctggacaaggatcaaattctcgttgtgcaagttgggttgcgcccccggtaacttcaagcgcattgcaatatctgtgaagctctgtcgtaaagaggctgtcttctcgccatagacccaaaacacagcttcgtattcgttcctctcaatcttttgctcaatatatcgtgctgcaatcgagctcttgccaatcccacctagaccaaagatagcaatggattggaaagatgtgtttgatcccacccgacctaagacctgatcgattttctcaaaagtctcgactctgtcgaaaaatcggggcgtctttctgcttggcagtatcatgcaacgaaattgctgcgcaagtgttgctgggtccggggagctgtggtgatctggacctgggagacgtgccgcaatcaacttttcgactcgcgcaacagtttcaatgagctcctggtttgtagaggtaaatcggcgctgaagcagcagccatgggtcattttgtcggtcacgactatcctcgtctcgtctatctgcgttatcggtattagtttgcctgtacagtagctctttcctttttgctacaactcaccatgacgcattacctcttcctcgccacgcatagacttcaccgcgctagtgaaaaattccactagctgaatctgaatatcaaagcatgcttcttttatttgttccggattgtccctcagcgcgacatagtagcctgtgaaggcctctgctttatatccaagagacttcaacatccgtggaattttggagagcgcttgcggatcttgagtagtaagctatcgcgttgtgagcggaattgaccgttgaagaatcaagcctaacggctaaatgctcacctggagtaggacgccgatgatgccccaaaagaaatcagcttggagaattggggccaactgagtctcgaatatttgtgtaaacttatagaggtggccaagcgttggtttgatcaaagcaatctcatatggaaccactacgccagcgcctgtgtctgccgatccccacacatatttctgcatcgaatcccaggaggtgatcgattttacctgcctcaagtcatctggctccagtgatttctcgcactgctcgatggttgctttccattgacggccgaagaagctttctctagcgtgaaatggtcagctaccaaacattggtatgctctccggttcgtgttggcaacctacaggtccgaggagtccatcgcgatgtggaggcagtagaaaagcggccgtaaagtggcaggatagtgtagcagaaagtaaatttcaagtgcgaggctcgttacttggtatgaaatggaaggaagggttctcgcagctagctgcatctgtaacagggcgtaacaaacattctgtgtgtatttccaaagccctttgtggaacagtgcatatgtggcgtttgttccagctaccaattaaaatcaaggtcaacgagaacgaaacataggctccaacagcaattatatcagttcttcgcaaaattgttagaacttccgaggatatcaatacaagaaatgaagctcttggaattagggctttgaagggtacgtagcaagccgatgattgaagtatcacgagcgttgggcgatttactctgagacatcaacggggcctggcccccgcagatccaaattatgcgggttttatcccgctttacgaagatcactctggcgatcacatagcatcttcagcaaatcaacaacactcattttgtagccattggcagtttacatgtacggtattggtattaaccccgaggcaccccgcgtcgaataaatagccatccatgctttcctggctgaatccgcccgggtttcttttatgtagtcttcctgtgaccacgcaccgctacttattctttgttttctcatccactatactatgctcacgacttgtcgcttataccatatagccatggtcaaaccagtgaaggttcaatacatcggatgggaggatgactttcgctacgccgaagagaaatctcggatcacagagcatattcaaaagattgcagaagataacggattttcccatgccttggtacagtgagtacatcctgaggtttacctgcgcaaacgaagcggatagctaatggaccttgggcaacatagagacatgatcatgagataccgctacagatcccaaggaccatggatagatgtgcatttcaagcgtgagcaatgggtcacaaacggagtagggaaatacgtgtttacaagattatggtttaatgaggatggggacctcgacaaggatccggagttcttcgaggtagaaaattgatatctggaataacctgagctactcggagactttcaatggatatataactggcctgcaatgtttcgtaaacataattaccggttagtagttacccagcgcactaggatttttcaataatgcgggtcaaagtacactggctggcggtcgactcccaaagtggaaaactggcgtaagccagtacccctcaccagctgcttcccaacctctagctaaccatccgacagattatgaagatacgtttttatcacttcaaaccgtcaagttaatgtgttggcctttttcacacaactcctatggcttcacgaatctacgcgccttccccttcgacattcgccgaggatccggatcgatatcgcgagaatggacttcatcctctcaccattggtgatatcctcaaattcggtagataccgaatagttcataagctgggctcaggaagctttgccaccgtctggctcggcagggacacatcagagaacaaatatgtctctctgaagatcttgtctgccgacacccctcttgactgtaaagagcttcggattttacaggagataactgaatctgaattaaaccacaaaggacgagagtttgttgttcagcttctcgaccattttaccatcgagggccccaacggccggcatctgtgcgttgtgacccctgtagccggagaccgtttggcgagaaagcccgggttgccttacaactccttggagtggcctcgaatcattggacttcagattgcagaagccttgggttatcttcacgtcttgggcattgcgcatggaggtcagtcttaatcgcattcaggtgcccgtggacaatgtttaacttcgaaacagattgttacacatccaatattctctcccaggttctcccatttgacgattggaccgaagaagagctctatgcttgcctaggacagcccgttaaacatcaagtacgtcgcttggatgggatgccaagggaagacaatgcccccgagtacacagtcgacccctgtgatataacagcactagaagctcgtctgtccacagaccgaattctcctcatcgacttcggagctgctttctatcaccacgaaagccctgagcagatcttcactccagctccattcgcatcccccgagattcttttcggcggcgagctcacgttcgcagtcgataattgggcatttgggtgccttctgtacgagctttgtgccgaccgcagtcttattaaattacttttcggatggaacaacgatgcgatgaaggaccaggtggctatgcttgggaagcctcctgatgctctctggcaaaactgggagggtaaggacaagtactttcaccccgatggaacaccaaaagaagcccacgataggcgtctgaaggtctacccactctccctgaagcaaagagtgcgaaacctggagaagcccctcagcgaacgaggctacggaacgggagacgaagcgccacttccaccagatctccagaacttgtttgaccttctcaatggtgtcataacttacgacgccaggtcccgcatgtcattcgaaggagtacaggctcatcctttcttcagaggcgttaatatcccggggtgttgacgatagtttatcgtcccagaagataagtgcacatttggttttgcatagccttttggagccatggtagcgatgagatattgagatggccggatcctggcaattgtgttttggtcatttttcctatcttctgtttctttgtctcggatttatctcgattctctaagaacatgagcatagctgtgtatgattgaatagcccgccactactgaattcactcatggtagaagcaaatccgtctttttcaacatataattttcatcggtacgaaccaagtcgttgacatcgactcaatacgttttctgacaacccactaaccagtcaccaggtgtaagtcagacacgatcattcgactggagctaacggaagaggacggaaataacactatattttgacagcctagctccccttgaggggaaattgattggagaatacgtctaaaatagcccgaagtgagattataacactgcaagcaacgcatgcctgaaaccgtggacacacgcgccaccaccaccaaccttggcgtgcaggaacataatattatgcgcaaatggtattcgggatacgccattgaagaggcatgttaacacgtaaagattcaaaaacggaccgacgctcgactaagaatataccgaaccccgctagaactgtccggggtcgaaacccgcgactttggcatacccaactggtgatttgcgcattggaaaggttgtacgggccacctagactcggcgcgtgcagataacaataacttggcgcataaattaaatgaatggtggaattgtaatatccgactttatctgctgatactcagctcaacgtttaccgaaaccccaaagcggctgcgtgcgttgagctgagtagtttgttacgcgtattcgatgcaccttccgacgagtaatatcgagcgattcatcccgtgattaacttgcagctagaatgggagctgtaggtctcagttgtggtacaatttcaaaaattggttattttttggtcatgtacctttcgcatacggatgtgatctgaaaagatacaagttctttacggttgggagcaggtaatgtatagcataaacaagtatcaatcttcattaaaataactctcaataatacctctcgcagtcgccatcatagaactgccgaggactacccttcgtaactcctgttgatctgatgcccccgattttgaaagtctgtttctcgtcttgacgagataaatgagctcccactatcgagtaacataaagcataaatcacttcctagtaagggtttgttagctgcgtacctttgcttgctattcgtaatactcacttgacagaccgcgagggcttaggcttctccttcgaaaagtcaacatcggctctaggatcgagcgcaatggttccgtgttgactcatgccgtacttggcgggattcatgccggcgtcaacatcatctttcatggtaatagcttctcccttaggagttgagcccatcaaggccgtataccactcccgccaaggctggacgaggtctgagttgatattttccgcgggcatgttgctggtctgtgattgggatttttctttgaagtgggaaaatttaggagttgagcttggaggttcggcaatgaattgggatatgtggtactatataactgttttatcggcaatgggaaattttgggctcgcagctttcaagagaccgcgacccctcttctagtctacgcaatgacgggtattccagtagttctcactaacaagcagtggaacacggtggtcaagtggttatcttgctcaacgtggaggaataccatttgacaaagatccctgtaggggcttacagggatggaagcagctacgtggaccttcggattgggctggtcctttgaaagagatgcacatgcaatcggttacagtctagtattgcctatacggcagttggtattatctgtagaaaatcccttatatacctcacgcacttccaccaagcaataagacccgcccattaactttgcacacagattataccatcaattagttatgccaatatggaaactacgatctcctatttagctcaagaccccattctcgacatcgaaaagccgttcgataccgacgtcccggttgatcacatccccggcgcacgcgcctcgaaccatcgtaacgatgagagagatgtgaaggtgtatccaatcactgatcttagcgaatgggacctcgagaaacatggtttctgcttcatcagagcaaaaacgggactgaatgctgaggatgcattgacaagaaagagggaggtacagaaaggttactggtatgagattgaagcgatcttgcacgaggctttcccacagtactcgagaattgagtgctatgattgcacggtattgtgttattctcagttctacactttgaattgtatctcacgcaatctgatgagatataggttagaaagagggacccggatttccctaccaatatcaggatctataccaaagtcgagcagccagcacgaagaccgcacagtgattgttcgcccaggggcgcgcacatgaatcttgagcgtgcgttcccaggacaggaaagcttttgggagggcaaggacttcgatattttgaagtaaaatgacccctgtcaagctacttacttgatatggactaaagtattcttcctagcgtttggcgaccactccgaggcccaaataatgactggcctctggcgatgtgtgactggacgactatcgacccttcaattgacgttcgcatcaacgatgccatcagacgtgatcgggttgatgagaatgccattgtgcatttcaatgagaaccataaatggtatttcatgaaggatcagtcggtggaggacttgattgtctttcgtaacgctgattcctttgggaagcgtgctcgtaagcttgattcttacctatctggggagacatgtgatgaaatttatactgacgtctctgaagaaggattccactgttcggttttgaatccggagacgaatgggcagctcagggagagcgttgaagtcaggtgtgtagcatttcgctagggttgtggtgtacacggagtgttttcgtagcatagtatagcttcatgatgcaatcaattccagctgacttatcgcacaaagcgtcgagatgattcttcgtatgaaatgggaatcaaccaacaccattacctgattagtctgattgatttggctagtgaactgatccaaaaaaaaatgtaacgtgtactgttgcggcttagagtgagtccccatctggattctgcgggtgttgtatatttgcccgtaattgcccgtaattgcccgtaaggttcagaatacaaattttgacagaatcatttagttacaaggcataagcccttttaaaccttctgcaaattgggcttgggctatgcaattccctctttcagccgtcgactccagcactaagatgtttgaaagcggtacagagccaatcacccataccgaggcgagataagaattaattaccttcttggttaaggcttgcgttaccgattcaacgcctagagtcatttgactttttcggggtttcaaattgcatgggtgatggctcgttctgcagtccctgcatgcccggttgccagctcacgccccctcctgcctgaaaattcagtaccgccttctaaattgggtgcgacattggattttaccatcatttctgccactatagagtttcctgccaatattctgcccacgtctggtttacatagtaaaaaacattcattttgatcagaaaaaaaacgaacggagttatattctgcctgattcctatgatctaacccctgactatgaagcagtcattaatgaagcagtagttgataaagcatttgttgatgacgcagttggcgatgaagcagttgatgtgatagaagtgacataattttgttagttgtttacatactactccgtacaaactgcaggtatcgacggagtatgtactccgtactgtctcgctactcaaggttgtgtagggagtttgacactaaagcggtgtagatagcggtaagtaggagcaggtgtcaaagtatgatctattcctaaatagaaaggcggtattgaactttcagacccgtctaatattagtatctagtttctcgcgcatggtgccctagaatgcactaaaatccggtcacggcgttactggcattggattggatcttccgcagttttgcaatccgaggatcaacttgaactagccttggctataccgcagcagtttatgttggagctgaataatatgtctgcactattgcagcagcaagctggaaaacactcaaaagaattgaaatgccacccacccataacacagcccaaaatgtgtaccactgcaatggatttctccgatcccgccacaaatctctaattctactcggttgctgcttcagattgtacagctgcaccgccaagagacgagggccgaaatgcgggaagtcgtcccgggcggagtaggtatctgactcgatgagagaattatagagatcgatgttggaggtgggaaatagctcgactgggatcctagacttcgtgaagcggcggaggaagcgggactgcgtgaccgaggcgctgcagatggcgagaaggaatgggtcaatttccccggaaagtttcttggtttgctcgagtagttctaatgcaatttggcgggagtgtgaggactggccgaatagaagacggtatgagagtaacacttcacggtggagagaagatgcgtcgttggctaagctgtctgtataaaaattggatggaagaagctcagacgaaaccctggcagaaggttagacaattcgtgcaaatacatttttgagggcatgaaaagagctcactgatagagaacattgagttgctgtgtctgtaaaatgctgctcgcgcaaaatgttggcaaacagaacacggaaagtgtccgggattgtcgatcaaaagcaagatgagatgccagattctcaacccatttcaccctcacccgacctatcgtatatagagagtaacagttgacacttgattcgtaaagtatatctgtcgctgtagccccatcgtgtctagtatcttccaacgtacccttaatggcacggaataactttttgattggccttctggcagattgcccgaggggaatctcaccagattcccctggcctgctgccatactttgcgcgtaggaatagagtacgatcatttcccgatgcttcattggcctgaccaagttccaggtctgggtctatcgtcatagatgcccagcatagtactgcaaatattgcaagaagagtgtggtccttctcaagaggactgaatccggccgaatttcctttgatcaaatgatggtaaatcttctccatgctcacagtttcatctgcctgcaggctctggattccccggagcactgcaaggaaccagtgccagccatgaacagcattggatggtttctctcgcttgaggattttccagataatttcgaactcttcgcacagcaggctttcaaacttcctctccaaatggttgcataaaatatgtattcctggccattgttttgcatgtgagattccaagcccaaagagcaactctattgcttcgagatggatatccagggacatgtcttcggtggttgtagctacatgagccttgtattagtttgattttgattccttctagaacactaatctctcttacctggtttaggtttcatcgaaagcatagaaaatgatggctaggagaactgtatttagttgatgggaaccgacagaacacatcacaaatacagatacggcaaagctcacatgtatgatacctgcagggcgccgccatattgccgacaaaaaatctgaaatgtctctttttgcggggggttgtcgaccatcgtgagcttcgagatccgggtcagaaaccatgccgacgagagattggatatgtatggaacttctgacttcgacttcgacattggcccctgagacgcatttcaaaggaggtcaactcaaccctatgaccaagagaaagaagacgagtctgagtaagcaaagcaataccccccaagcgttgctaaccggattgagcgaggatacgatgtggttgtctcggacttcttcacccagttgcgtttgttatgcatgacgtggagtgatagcgcttaaaaaataagattacagtagagctgaactcttcttatttctcaatagctttttcgctccacagaaagaagtgaaaagctaagttgccactcgttatgcctccagcaggcaaaaattgctgctcttttatttcgacgtaggaaagacggccatcagcctgggaaggttccattgctgtatcgaccagatcttcatgtttcgaaagactcacgggtttatttatcggcggtttaggcgggttcatcactttcaaagtatccgagaagaggtaatgggcgggtatgcatggcttgtctcttgacttgtaaccacataaacttcatagaaaaacacgatacggtattttccatgcaaaagagaggggcggtaatgagctccgattggccacgtactagcgtggcgcgaggcgatcacacctgaagtcccacatcgggttcgattggaccaagggcttgataccctgctgcatccagtcagcgctagtcctgtgaccagcggccttcgaatttatgtttcaagtagtacataattgaaaaactagtggcattaaaatggcgtttttccaccttcccactgccgtcggagtcggccctccggaaccgcgaattgggttttttgacaggtttctcttgggagattcggtgacgatagtgtcagcttctcggttttattttaggcataatcaatgattgagaataaagaaagaaattgctcggtagaaaattctaccaatgtgtcctatagcatgtatgtgttctgtaatttcagtcaaagaatgtgagggcctgttgggtagcgcagccccaatccccaatccctgccaactacgctgactgagctcccctccccatcgcttttacggcgctacgtcttttggagcacgaatcagtctacccctcctccacattgaacatcgctccacgatagctaccttgcctttttccaagccttgaggtgaactgttttaactccccctgaacctcttatcattcataacctccctcaccgctgcatcaagtaccatgtccgttccccaaagctcctttaccccgcctcctggcacaccaatccatcagctagccataaagccgattttcgatgctcttgagccgcgggagaagttctatgctcactattgtgcaagggcagcatggcatgggagcagaattatcatgcggcaggtatcgccagaaagccctggcatcttcgacttcatcatggacctctatcatgcttgcgatggaaaatgggacaccttagtcacccaaagcaatatcacatccgaagagctcgaaagatttctggagtatgccgcaatgtttctctgcaacttaggaaactactatgtaagttcggcgagatctttctagcaacagcactgactgtgtaatcagggcgaaggagaccaaaagttcgtcccaaatctgacagccgaagcactgcaaaggatcgcaagcatctcccaaaagacgaaggaaggtctagacaaaatcatcggtccgctattggcagtcccgccattcaaccttggatatcccagcaagagcgcacagtcaggttattacactggcactgaactcatgtcacagaaggagattgctcgagtgtcggaggcaatgattgaacattccattgggccagagaatacccgagttcgaaagctaattcaggatggaaaacctatatatcatttgcttcaagcttccgcggagactggtgttcccgccaatggtctacacgaactggcaaatgacatattcatcgttagaggcgatcactcggtggaaatgtcgaacatctgctcggatctggcgagagcaaaagaatacgtcagcaacagcaggcaaacccggttcttggagctctacatcgaatcctttagtactggtagcctcgaagcttaccaggagtcacaaaaggcgtgggtaatggatgtgtctgcaagagtagagaatatgattggtttcatcgagagttatcgtgatccggctgggatcaggtcggagtgggaagctatgatcggaatttccgatccgggcgaaacattgaaattgaaacgctttgttgagagttcaacttctatcattcgacaactcccatgggcagtcgatggtgtcaacgatgggaaaggcccgtttgagaagagtctgtttgaagctcctgactttaccagcgtccacggtgagataaagattgtctcctcggcaagttaaaccatatactaattcccttagcgcttgctgtatgcggcagtgtcgtcttcgaagccgccaatcttcccaatgtaagctctggaaggggatttctggattgaatgaagctgacaatggagttagtacgaatatattcgagaaaattatggttttaagaatattgttctcgcaaatcgtctcagtgctaacaataaccccaatctaccagtgccttgggtcgatccatcagagttagagcacttccgcaagagcacacatattgtcagatttctcaccaccgctatccatgaactggtgggccatggaactggtatactcctcagcgaaaccgctccgggcatctacaactttgaccagcagaacccgccgatcagtccactgaacgggaaagccgtgacttcgcactatttacctggccaaacttggaatagcgtttttgaaaatttggcaggaacagtggaggaatgtcgtgccattctagtctcggaatatctcatggacaacaaggatttgttgtgtattttcgggtacaccaataccagtgaaatcacggctgacgaccgtaagtgctaccacgaccgtgaatttagcttgcttactaacccaattttagtcctttataccacctatctcaacattggtgtcgatgggcttcaggctctcgaacattataactttgaaaatcaggcttgggggcaagtccaccaccaggtatgtattcctaccttttcatgctctagacttattaaaactaagctgctacctaggctcacttctccatcctgaaacaccttctccaagatggcggcggcgttatccaaatctcccatgaccccaataactccactctcaccgtccatatcgaccgggacaaaatcatctctcacggcaaaccctctttaggccgctacctctgtcgtctacatatatggcggtgtactgccgatatttcctcttgtaaggaattctatgagcccatgtgtgctgttgaggggatatacgaacagtggcgacagattgtgtgctcgaagccaaggccaagatggaaattcactcaacccaatacgtttgttgatggagaaaccgtggaggttaaactgtatgaggagaataacaagggaatcattcaatcatgggctgagagagggatttgaaggcatcaagattggagtgcatggcaaatagggtgtctttcctcaaattcctgaaatggatattctgccttccccgcttttaatatttccggcccgccccgtcgtgccttccgcgtatcagtcccactcaacgatacttttctaaaattaggtaccttttgtgtggtagtatacccatacaaaaggtacttataccccatattatgttctcaaccctctggctagttaaaggagaaataagggtttaaatcaacaacaaatcatagttaaattaattggctaataaaagaaatttcaaatatcttatatagagaagtaaagaccatatttatgaaagagatatatgtagagacatcaacgttctaccacttggagaatactcaatatttcttcctaatatgttaatagtaaataaaatggacctcctttagactatatattccctactatattttttgtaagtattcccagaagtgacaaaatctctgtttcatgttcatgtaccttttgtatgggtataccatataaaagacacctaaaaagaaaaatctcgtttcgtgagaatctctcgttatgtgggacagacccatacctggtacagttatgggggtggtaagacggctaatatccatctcttgtacttggtatctggaaggagatgcactacgtattacacatgtgttccctctttgcttgttgtaatacattttgatggatatattcttcgttcttcctagctacatgattatctccgcggtcaattctccattttgattaaccatgggaaatcatacccaaatgacattccctgaatcaaacccattggcctcattgctccatggaagtatataacttcgctggttactcacaaccctaatccccctctccttaaactccgttgagtaatgtgtatgcccgaagacccagtttttcacaccattccacggctgcgataataagtctgtggcaaatgcagcactccaaggattcttcgcatgctgtggactcgatgtacggtgcatagcgggtgcatgatgtgttgcgaccagaatcgaccgtttcgataattccgtaggatttgttttgtggttattataaatcgattggacctcattgcgtagccaattcaagtcggactcatgcgccgcattatgctcgtcgaccgtccaatccttgattttctggaaatcctggattttgtaatggacaatatctctggagttttcgggaatattagaccaaaaagtaaatcccagtacggtgacatgggagtctgggatgtcatatcgtcgttggtggagtaaaatgagtcgtccatttaaagatggctcttgttcaagtcgcctcactgtttcgaaagccaactcaaaggatccgccatagaactcatgattgccgaggataactcaaatttctccacttgcctttggaggaaacgaaggtattgatcgtagtctgctaaacgcccaatacccccggccagcagcagatatttggagacaactggcacgtcaaatgatgtgtattgctggttcacttccaagtgaagatcagaaagagtatgaatggagacagacggctggctgaacaattttcggataaattgggccatcatagccttgaacaggctccagaggctgagagaaaagtacggagtaaaacatcaggtgggtttggtgggtagtcatgtgactggcaagtggatcagctgatctctctagcgttatctatccaaacttccagcaccctggagatgtccagcatgggctcctagggtaggagatctctctaccctataatcgtctgcagtcctccatcttgtacatacgatcatagggtgtggaaaatagggcttcccgtccgctcagccgtactcaagccacacgccggtgagttagtagttgggtgggtgaccaccagcgaatcctcactgttgtatgttttttgtctttttttgttcagtttagtaatagtagcatagttatccatctagtcccgctgtggacctctattaataatctttttagaaatgaagcttgacgagacataagcacttgacgtgtatatctgacgctatgaccatctatgcagaggtcacctgacctgatggagataagccggcccacggataattctcggctattctatcttcccagggtcctatcatgtgatccccatctccccaccttttcgactatgtagtcccaacaacaccttatgaccaagaacaagatccccgtgggcctccggctcctctagtggggaattcaatcaacaaattgcgctctatcacatttagtttgggagtgctccagggagttgagaaatgtcttcttaatttaccttactgcctcggaaacaagaacaacaagcagctattaatggatgacggttggattcgctttatcatcaatgcatgtacaacacggacattagcgcatgcagccatgaagcttcatattgatttcggtacgttataacatcaagaattaagtggaccctggaccctggtaatagcagaatttccctcgcaatatttcctccctcgcaatatttcctccctcccaatatttcctggttgttcgtgtaggcataacagtgctcaacaaaggcgagagaactacatcaagcctccataagtttgcccatcttcactgcgcttctcatccttcgtgaagtatttcttgaggcgttcctcgtctttcttcagctgggaacgcagcccgccctcgtttgcgtgatgcttgtcctgggcggcatggtcctcgccgaccttatgtttgtcctgggcggcatggtcatggtcttcaccgtgaggcttgtccttggtagcctggttctcgcttccatgcttgtggtgatcatggtggtggtggcggtcgaggatcttctcgaagaaggaatccttgtgttcgagcttcggggcgtctacattgaacctcgggttagaatctgggggttagaaggcttaagtaaaaagtcacgaaccttcagtcatcgtgggcaaatttgatgaaaaatatatagtgtagaattctggaaattgtatcttatttggggtttaaaaatgctccgctaggtgatgtcaaagactctttcatctactatatatacatctcttgaacgtacgatacttcgtgaactgtcggaatgaaccttggtaatgacgtgttgatcgatctctaatcggccaatcagagggcctcgggaggtatcgggtatagagtcgataggtataagcagtactgtcatagataattgatctacttactccggcacgagtcaaccgatactagcaaatttgaagacaaaactacgtagtgcctagataaccccataaaaattcattgatcagcatagtcaaatggcattctatctgcgatataaatgactgttttcaaatcaattgtatgtgagaatcagtgtccgcaattcgaaatcaacacaacgcatgggataatgtgactatgcaacaaagtattgtgcaaatagatagcggaaagcattgcctgtagagactgctccgggccgtttcacagcctgatgtgcttctcttccctcttttctcgatactatcaccattttaatccaattctcgttcccgtgcctgctccggtaaaaacgtaaaagttcctccggaacactatatctgcccctagctcacgctggcaagtgatctatcttctgtctgccttccctctatcatgtcgcctattctagctcaatggtgccagggggctttgaggttctagaaagacaaaatgtcagcgcatggctcaagaccaatagaggctaagacttatacttacaaatcatagacgacacgggcaacaccctccaccttgttgcaaatggcgcgcgaaacatcctagggtagacaggtttgtaagtataggaaataatgaaattgggcctttgtgggaagggatggagtgggttgggtccgtggtataggacccacccgcccgccttgcggagagcccgaagtataaccaagacctgactcacctggaggaaggagttactgaagtcaaacacttctgcgctcatgaaatccttggtacgaacagcacggagaatcacaatgtaaccccaaactcgctgatcaccgaatacaccaacactgcggttagtatcgagaccagcaaaggcttgagatatctgtgggagaagagttagtttgcacccgtcttcgcctgtgtgacccgacttacctggtcgtaaaggccggcctccttgatcatgctgatgaagatgtggtcagccttacgggcgatctctactcgctccttggtaacgtcgccgaggatgcgaatggcaatgccaggacccgggaaggggtgtcggttcactagtgactcgtgtatgccgagctgtcggccaatggccctcacttcatccttgaacaaaagtctaagcggctcaataagctgtaacagaagtcccgtcagctttctctgcgttgatgaagagatggaaagtatacttacacgcaagccttgctaaacgggccatgttggttagtaagtaaatcaaacgatactagattagctcgacttacgccgttcatcatccgctaatgctggttagttaagatccttttatattcgggacggtggtattgcttacctcaggcagaccgccaacgttgtggtgagctatttctaatgtcagcttttgttctctcttttgtccgtggggcagtcttctgctcccgagacctcgttgactctcttactcttgatagtggccgaaggcccgcggaagctcaaagattcaatactaaaatgttattagtttggaccaggcaatcagcgcagaatgacttacacgtcaggatatagtgtcccttgcaggaaccattccaccttcccggtgttgggggtgttttctgcctccttctcaatctgcaagtcctgttagctagccaaatagcctgtcagagaaggtcgagcgtaccctaatagcctctttctcgaacagatcgatgacttcaatgtcgttagtaccctgtcaccaacacatcccaaacagcttgaagtacgcacaagttgacccaatgatcttccgcttcttttcggggtcagaaacacccgccagacgacccaggaacagctcgccagcctcgacaactgtgagattaatgccaaggtgttcgccgagcgtggccttgacctcctcgcactcattgagacgcatacatccagtgtcgatgagaatggccttaaagcggtctccgatggcatcacgcatgagggctgctcccacagtgctatccacaccaccgctgacagctccaaggacgagtgctcggtcaccaacaagatcgcggatgcgagcgatctcgagctgagcgaagtcgcccattttccaactcggtttagcgccgcagatatcaacactgaagttgcggaggatctcgcttccgcggggtgtctagatctgaatattagagggagttatagtgtaataccttgggggtgacgaacgtgttcgagctcagggtggaattggacgcctagtcaccttgcattagcatattcccttactgggccacaaaggcagcttgggggaagacaaaccaaagatgggcttctcctcatgggcgatgccggcgtactctgagttcttggtgtccgcaatgatcacgaaaccctattagagtcaataaaagtgcttcggaaatacgaagtcatttcactcacagcaggcaggctaactagcttgtcgaagtgggacatgaacacaggaatttcatcccccaatccagcaaagaggcggtcgacattactattaaccttggtgattttgaggtcggcgtggccatactctgcgaggaaagggtcagaaataattttatatggtgttccgaaggttgcaaacctcgagtttctccgcgagcaacgttcgttgaatcgatccgccatgcgatctcctggcaaccgtagctgggtgatttgtattagtgtcgtaccgatgtcgatgttggaggaaggcataccaaatacccctataccccggtgttagtacaggttcagaaccttgagggatgggcggggaaaacactcacagaataggtacattaaggtcaaaaacagcggggtcaacatctacacatatgagtacaggcaacaggacgttcgggggatgaaaaccttacggggcgagccctcgtcgtagacggaagaaggacctagtatcttagtcagacctcagcacaaaccatgtgttaagagacttcatacctccagagaacacaattcctttgggcttccatgtcagctcagcgatcttggtggtacacggaagcagctcagcgaagacaccgagagcccgaagccgacgtaggataagatggctcgtttgagacttcacaaggggagtcagcatttggcatttgaagagggccaggagccggccagcagtaatgaagctccgttatctgaaacaggccgaaagagaggaaagatggcgctcgagatttacatacgccaaaatcaagaacgaggatagtctagagagtcaattgtcagtcaatccgttctttttgcgtttatgactcaattgcgccggcacggcctagggctgcttgatcgcaagttgctgaaagcgggacaagtgggtttcctggctcgccattgggatatgatggtacgtacgtcaaagttgttgtgaggctcttcggcctcgatagtgggagccattatgatcttggtttcggcagggtatcgaaaggattagcggggtgaagtgagggaaaaaaaaaatatgtttggtataattgtaccgcctccgcggccgcctcctaaataggacaccgccttcaaaatgctctatcgcgggtgaatccacgtgacgctgtacgctcttgaagaatcttttggatgtttggtagcatcttcttttcgaatagcaaagaaaaaaccacggcagactcgaaagcgccctgaaaaaggtggtatctgtcaatctagattgggtcgacttggtgacccactccagaattctcacctatatcacttacactcaccccaagaaaaagaaagaattgtcgcatccaggtcatcgtgacgccagcctgaagttcaattggggtatcttcaccagggtaggtgccgttacccctaggagccacaatgttgccattgctatgtcgtcggatagactagtagaatcggaataacgagcagaattggggtttcaagtgaacaagtaagaagacctgctgttgaaaatcaaatcgttccagaccctataagatgtatatgtgtcttgtcaacagctccatggttattgttttcaaggacgtcatggaacatgagcgctgcttatggcgaattcaatgcacatcaatggatgattgcactatgggatacaggtttctatgtaccaaatagattaaacccggccatacctgagctttattattgatcgaaaagtgatgaggaacaggaaacagacgtaggcaaatgttcgcgaccaaccctacgtgccaaggctgatcaatcctgtccgaggtaaacgccgacgcgataacttccaatgcaagtggagctcggaattttaacggacttttaaatgtcatgacattggtcggtttccccgacacaaaattatgacctgagagatcgtcgacgacattggggctcgggtaaaagccggagaccacagacctatgaaccccgtggggagtcgctccactatgattccactttgtcatctcttcccctttgggaaaggcaaatccaacttcgtgatttctacataaatacctttctaatccctatctaggagacttcattatcagtcaaccttcaacatgaagctcctcttgtcactgtgcctactcggtaccagcttgatgaccggagttgccgcgtcgcgcaaagaagtagtaagtggcacgtctgcggttgcaagcaagaaactcccctcaccaagacgaacgcagcggtcaacacatgaagctccaaaatgtgccaattctgcctccacgctatcccttagcgaccctccttacgacaactatttctactccgactgcaatgtagcggcccaggtagtcgtcactagtccattgccagatagtgacctttctttgatcgcacctcgtttgatcatagcttggcctgctggtgacagtggggcttgcgcatacttcgcgcctcaaaacggggtcaacgggtcattatcactcgagctcatcaattcaaccatcgggaagcccttggcacccatctacaccgcggagctatcaaattcatctaatacctatcccagtgtgggagttcaaggcgtactccggttcaattcgtctgcaacactgaccgtgcctgttctgggcagcatccgctcaatccgtgaattcagcgaaggaagtgtccttaggcctaagattcaggatgcgatcaagtttacttctaatagcgatgggagcgcctcgctccagcgactctggttcgataatgtcaccacaacaagcctccatttccgcccttggaataatggcagcaacagcgacaagggcagcatggtatcggtagatggtcgcaccgtgaaattcgaaacaggcgactatcttttttccgcggaaattaactatcctcagttatcccagaccagtccaaccgcagtgctgaacgaaaattctcaggagctaatctcgtctatgccggatcagacgaaggcgctttcatttatgtcatactcaagtaaggttctcgcaggcgcatggcattacctgacctattttggtcgtgactcaatgattactgcgcttttgttggagcctgttttgagtgttgggaatgcaagtgttatggaggcagtgattggttctgttttggagcgggttgatcgaacagatggaagtgtttgtcatgaggagactattgggtgggttttgtgttgcaatttccaatctggtggttctaagacatttgattggaagatgctcttctatatgatatgcatggctaactacgggatagggactatgcgacctggtctaacttgcaaaataatatcccaagcaacgcaatgggctgcgactacaaaatggtctgttgagtaatcactccagtgctattgtcccatcgggcaatatgaccaaagaggcaaagctaattgagtcttttatcaaacagattgattcggactattttctcccgatccttatgcaacggtattttctgcagaattctgttggtcaacagcgaatcaaaaccttcttcaagtaagaatttctaccctcctgatttataaaggaaatcactaatacttcttctctagtacaccggctggctcggccaatgtggcgaatcggaatttgaccttcggcgatctggctctaataaatgctgagcgaatcatgcgtcttgcgggcccgtttgctcataactctatcaaaaagaacctcattcatctcaaagagggccaagatatcggccaatggagagacagtgaatacggtgagcagaaccctgccttctcgaaaattcccagggtatatttgtaaattggacgctgatttttgacaaaactttgaaataggtatcggtggaggacgtataccctatgatgtaaacacggctctggtcccagcagccctgcgctctatcgcaagtcttgcacagaacaacagcatcttttcgggacgcaagaactggtctaaactcgccaatgcctacgcaactgtatgggaggacaagaccctggaatttttccgcttgaagatcccccggtccgaagcacaatcacttgttaaatcctacgtcaacgaatcctcctttgcaggacccaaccaggtctcatccattgacgacgatgttactttctatgcactggcactggacggcaacgacaaactttccaaggtgaaagtaatgaacacggatgactgcttcagacatttccttctcaatattaccaataacgcccagctcaccccgttcctcaaccaaactgccaataacatcagacgcacctttccggctggtctcatgactgatgcaggcatgatagttgccaatccggccttcggtggggatcctgtttatgcaaaaaactggacgacgggtgcttatcatggaaccgtcatttggtcatggcagcttgctatgatggcaaagggattggagatgcagcttgaacggtgtgagttgacaacggaaaagcttggtcataatggacagcagcacgcggcaacacccaaaccgaagttttgctctgataaatatgtctacgacaatgtcaaagccgcctataatgaactgtgggactcgattgagaagaatacttcgcagctctctgccgaagtttggtcttgggtttatcgtgacgatggcttccaggtcaccccgctaggagtgctgccaccccctggtggcggtagccagataggtaaggtcttctccggttatcagcatcatccgatttttttttcgtgttccttttttgctaattgcctttatatctgtagaatccaatattcaacagctttggtctctagcctttttggctgtttccaggaacaaagcttataaagattgaatgcaaatatctcagttcatgccgcttttatccgattccatcggaattcaatagatggacggttaacaatggtggaagacggcagctaactttccagtttactttcgaacgtgaaaccttccataccgatatgtgcagcatactttcatctgtatatactctttcaacaaggcaagctgctacaattaatctctacttttcatacttgcgatatatatatgcaagttcctatccgttagtgcattatataaaacaaggcatattcactactctcggtgctactcttttaattgttgactcttactaggctctatcacaactataaaatctctttccatgatgacgatcgttgaaaagagcgagcagaaacatggatatggaggatttaactaccgcctaccaaagatatatgcaacacagtgacggtaatggcgaacacaccttgaggatatcagtgtttaactagactgttgtacttctggagacaaaggatcgttcagatgatagcccttagagcaccgatagaggcgggtgtttcccacgcaatttccaaagcaggagcaagtatacggaggaccggccggaaaaatatctgccaagaccagcctagataagaatatagtgagtatggacatcacagatcacacgatgtccgaagtagctaaagactaactttaagccaagtacgactgatacgaactgtctagaggtccgttccgtgagactagaggcacccacacgccatactctgatacctatttagcttcagctgacgctggctgattccccataatgtgagtgaataatatcagatacagcacaagtattcatcaagttgtctaggtcagacctcgggagatgaaggggtggatctcctatattcgtcttagacaaatccttggcagcctcgaccatatttagagttccacccaatgtaacctaaagctgtggtctggtgcttagtaagacgtttaattgaaggcaatctcgtttagcctatttaatcaatttggtggtaatgcttggctttatcattgagtgaataataaatgcctatactccgtacagcttcgctttatttcaccgtgaacttgattggaccacacttaaattgataatatctccacagagtcgggagtaacacattagcagatcaagcgaaaaccatgcactattggcccggggagacaccggacgagaagcagggagggagacgaagtgatcaaagaaagaaacagtgaatactcatttgctcggtgtctcggtgtctcggcacagaaccgagaagtctaaataaattaaaataaggccgaacgaacatcacacccgagcacatgcagcagcaaatgtaaccctagctaaagggaggcgattaaagcgaaggtgatccgtcgggattccggctgccaagtgcttacctgctgactatagccggggtttctcccacgtaatccggaatcaaagtgacatgcattgcctaaattagggcgaaagtgtcggacaaagcgcaggatgggttagcgtcaaaactccaacaaattagcgtcaacggacctaccttatctaaagaatgctaggaatgccaccggaagtcggtggatacacatgaatatatatgctttctgtatcgtgctttgagactagtattatcctacagatatcacacctattaaaagattctagagactgttgacatataaaccaaaatcaattagaacataagacaggcgctagggaactcaatggaaagtagaaagggtccgagctctccggggctagcatgtcaacatcttagggcaaatgttatcatcagggccaaatagggggttctcaaaaaacgatcagggttcaattgttttttattatcgcggtgcgtggcaagacagttctgtcgccgcaagcatggtggctcatttcatggctgcatggtatcataaacatggtcagctcagtggtccgataagaatttattttggattataaagaggatcataggaccgaataaaatgcgcgatcagctctacagccatactccagcgtactgtcctcaagtatgtccaagtcgcctgtagaaaccagtgacttgtccacggtggctagccaggaagccattggcgagaagtatcctgctgctgtggttactaccaaagatgagcatggacatggtgaagatgacgccgacagcgatccggacgcgattatcatcaccggtgctgacgcagctattcatctcttatctcttcgagatgactttgacacggtcttgacctttcgcagtatattacttgcttccggccttgcgtgtttccaggctgtgatgaaccagatttatcaggtatttccaatccatctattgcccatagagatactaacaactcgttctatagttcaaaccgaccttgattacgattcaaggaaccttcatcgttctcatctcctactttgtcggcaatgcctgggcgagattccttccccgtggcgataaattcgaagctcgctggagggcgaaaggcggccagggagccctaccatggtggatcaaggtcataaagttcttcaactacgggccatggagtttgaaagaacatgcaatctgttcaatcactgctacgtcggcctcaaatgcggcgtctacctcaaccgtgtttgcagcacaggatctattctacaatcttcccctcacccccgcgactgtgatcttgagtactatctctattggcctgtttggctacgggatctgcggaattctgcgtcccatcgctgtctggcacacggaggccgtctactggagtagtttgcctaccgtcaagactctccagggacttcattggcaggaagtcaaaaactcgaaaccgcttcgatacttttggtatgcattcactggcatgtcaatatacgagatcattcctgcctacatcttcccgtggctaaactctgtgtctattccggtaagtggtatcgcaatgatctcttcagatgaactttctgattatgagaatctcattggaacaatttattaacttcggactttatagtgtttggctgcacaaaaggccactggggaaactggtgccgtactcaacaatatctttggtggggcaaccaacaatcagggtctcggtctattttcgttctcgttcgattggcaatatgtgagatgatgtccccctataacacattgatctatcaagtcatctaacagaagcagctcacctctttccaaacctcactccctctcaaactgcaaattcatcaggcagctggacttttttcctgcttctttattatgataggcatttattacggaaatggctggaattcgagatcacttccattcatgtcgacgagaatgctcacgaacaacggcaccacataccccctgcacgacgttttccccggtggtgtcctcgacgagactgccctgaccaagtttggcttgccgaggctcactggaacttttgcattcgccatgttcatggccaacgcagcaatgggtgccctgatcgttcattgcatcttattttggggcaaggatatccgtcgctcctataaaagcgcgagagagggtagatatgatgatcggcaccatgatcatatggccaagcattacaaagaggctccgtggtggtggtatatcgtcgtgcttgttggcagctttattctcggcataattgtgactgtgaaagaaaacatcaccttgtcggtttgggcatatgttatttcactgctagtaggatgcattatcgcccccttcgtgagtacaacgtcctcgatactgagcttcatgcagaaaaactgactatgaccgtgctatagagtgtcatcctctattctcgcttcggtaatggtattgcaaccaacaatttgtcaaaaatgctggctggactcatcctgcctggacgcccggtcggtaacatgtacttcgctgcctggtcgcataacgtcatttcaaatgcggttatgctttccaatgacctgaagatgggcgaataccgtgagtatctatgtcattgttttgatcaaagatatgtttttaacttatctcttagtcaaaatcccgccccggatcatgttcctgacacagttgtacggcacagttcttggtggtttcgtcaactacgccatcatgatctctattgtgtcaagcaatcgagcgcttctcaccgacggcaatggaaattcctcctggagtggtgcaggcatacaatcttacaacaccaatgccgcatcatgggctttggctccctatatctataagattggtaccccatacggggctatacctattggtttagccgttggagctggtgctgtggttgttcaccgcatcttttatcacgtgagtaaccccatagccttccctattgcacttggaactgacatccgtttgactcttagtttgtacccaaaatcggaaagctcgacgttgcggaaatcaatctcccgcagtacatccaatacgccggttatattccctacaaccaaagccagacctgcgtcatcttcacctggatcaccgccggattctacgttcaatattatctccgcaactataagccgcggattttcaaggattattcatatctcattaccggcgcctttgatggtgctagtttgacggttctcttcatcctctcgtttgctgttttcggcgctggtgggccttcgcacccattcccaacgtggtggggaaacaacgataatgggaactacgattggtgtccggtagtagagtaggggaagggagttagatgatagggaatttgaatccacagagaaagttggtcacgggagtgtgaatagtgctgtcgctgaactccgagccagaacaatgtcataattattatttaagttgcgggccgtggatctttgacgggcgaatatcgacatattcacggggcgagaaccagatggcggatagactgtagtctctgcggtagtaggcagtggttcgaacaatagcttcggtttattcttcgtcgaaacagtattcggtggcggaacgatatccatggggcaaaagggtagccattctggaggtttgtccggtacggggtcctagcaagaatcgcgactcgccagtgtacctccccgaacacttcttggggccgatgttatcgtatggagacgggactggatcacggacctgagtggctagaattcattgcacggggacttcaatagcgtttaagggaagttttactgttttcgcgagactattatctttccaagggatacatcacagtgagctctgattggctagtgacataaggacctcgctcctcacggtacgctctccaaccactatatcattatcgagctggcctatgccattgctatagtgaacaaacaaaaacaaaaacatacaacagtgaggattcgctggtggtcacccacccaactactaactcaccggcgnnnnnnnnnnnnnnnnnnnnnnnnnnnnnnnnnnnnnnnnnnnnnnnnnnnnnnnnnnnnnnnnnnnnnnnnnnnnnnnnnnnnnnnnnnnnnnnnnnnnnnnnnnnnnnnnnnnnnnnnnnnnnnnnnnnnnnnnnnnnnnnnnnnnnnnnnnnnnnnnnnnnnnnnnnnnnnnnnnnnnnnnnnnnnnnnnnnnnnnnnnnnnnnnnnnnnnnnnnnnnnnnnnnnnnnnnnnnnnnnnnnnnnnnnnnnnnnnnnnnnnnnnnnnnnnnnnnnnnnnnnnnnnnnnnnnnnnnnnnnnnnnnnnnnnnnnnnnnnnnnnnnnnnnnnnnnnnnnnnnnnnnnnnnnnnnnnnnnnnnnnnnnnnnnnnnnnnnnnnnnnnnnnnnnnnnnnnnnnnnnnnnnnnnnnnnnnnnnnnnnnnnnnnnnnnnnnnnnnnnnnnnnnnnnnnnnnnnnnnnnnnnnnnnnnnnnnnnnnnnnnnnnnnnnnnnnnnnnnnnnnnnnnnnnnnnnnnnnnnnnnnnnnnnnnnnnnnnnnnnnnnnnnnnnnnnnnnnnnnnnnnnnnnnnnnnnnnnnnnnnnnnnnnnnnnnnnnnnnnnnnnnnnnnnnnnnnnnnnnnnnnnnnnnnnnnnnnnnnnnnnnnnnnnnnnnnnnnnnnnnnnnnnnnnnnnnnnnnnnnnnnnnnnnnnnnnnnnnnnnnnnnnnnnnnnnnnnnnnnnnnnnnnnnnnnnnnnnnnnnnnnnnnnnnnnnnnnnnnnnnnnnnnnnnnnnnnnnnnnnnnnnnnnnnnnnnnnnnnnnnnnnnnnnnnnnnnnnnnnnnnnnnnnnnnnnnnnnnnnnnnnnnnnnnnnnnnnnnnnnnnnnnnnnnnnnnnnnnnnnnnngtgggcggacgggaagccctgttttccacaccctatggtcgtatgtatttgatacggcgctggaggggaacatagagcaggtgaaaattatgaactatagctgtggtaggatagatagagacggcttatgtttcatcattactattatgtcaggtgacctatgctctgtagatggtcatagcgtcagatatacacgtcaagtgcttatgtctcgttaaggtaaggcggcgttgtaaggtagagcgaggcacttgaaagcggcgtgctagttcgcgaatagtactaatttcttggttctcaaaagcctggatagctagtagtatacctatacgtatgtaataaaagttatacagtcgataaaactatatcttcttttcatgcacgccttgatgttccccaagatattaccgaaacaggcaaccccgagcgcggctgagcgtttatatgcgaaccttggaataaagaaccgtggtatatcttatctgattctaagaccaagagtggaagaaacataaaacaccaggaagggtaatatttgagcaagcgcaccaccagttctgtatacacaatttatcgaccgaagtacttgagctccaagtatcttgccggtaggtaagtcaaagccgtcacaacaaatgtaaactcgttggcaacatcaccaccgtaatctccaatcacgcgggcaaggggaccgataaaccaagtctcatccatgcccatgcaccacgccacaaccccaagggcaaacgccacgctcgcgccaattcccaacggaagcctagccgggtcgttccatccttcgagatcatagttttcaaagttgcccttacgaaagatatagtgttcctggaacaggataatggcataacttgtgcaccagtatcccagcagactcaggaaattttgaagatattcgttcagcttttggcgaccaccaattgacaaggcgatgatacaggcgaagcagaacaatgtccaaagagatcgaggaatgcgagcgaagggtcgggcaagttgctgaaaggagatagcggaactataaatgctaatgacgttgacgttgataccggacaaaacgaggagcgtaaggaggaacttggcgaatccgcgaggatgaagcatctcttgaatgagatagccaatccctttctcatatgcggcggaccagtcgggcttagtgttcaaagcggacgcgaccatgcaaccagcgaccatgccgatcgaggtgggaatcgagataccaaaagttgtcatgaggaaaatcttcaaacgactcgtgttggcaggatattgaacatagtagtcgctagccattgtgcaccacgaggcactggatccgtaaacaacggccattagactgagaacggcaccggagagagtcgaaccagtcacggtagccggggccgcattgtctgcatattcaccggtctcgccgtagatgatcaaaaaaataaccaaaaacaccatccaggcccatctctcgtaaatcaaaatggccttcaacccgacgcaagaaataaacagggccaccacagccaaaataacaattcccagaatcaacgagacgtggccatcggagactgccgtcaacgcaagacccccagtgatacatgcgacagcagcccatcccatttgctggataccgttcagcaaggcgaccagcttattaggccaccaaccaaagctgtaccgactaacactgatttgacgtaagccagtcaccgcgccaaaggttgcacagaacccagtcagcgatgcagccaagattgaaacaaatatggtaatgaggatcgattgtttcatagtcaggccgaattcccagccgaggaagccagtcgcaaagcaggaggtgttcatcgtgccactcgcccacagagccgccattgatatctcctccacccatcgtacctttcttttatcttcagcacgcttgcgctcgatggtatcaggctctataccgagtttcttatccagtcgagcctccagggcgcgaatcctagccaggataccggtctcttgagaggcattatcgtcaagtgagatcacctcaggtgaattgtatttttcagttgggtgttggcctgttgcaaggcctttctccggatcataggccatgatttctgatggagtgagacgcggcgatgggaaaacaaggggcggcactctgtggccacctggggaatcggtgaatttttcaggctggggaaaaaagataaggcttgtatgggagaaggtttgccagctccactccggcgctgtttcccaatctggtacataagtagttagcggattcagtaggttacattggccgcatgtactccgtactaactggttagtttgaatcttggcttcctttcggttgatatttcctacccacacacgccacacgggccccttagtaattacgtggcgccacggggctatctacagactccgcttatcgaaaaatgtaataagaatcgggtgtaggatttcgcgagtggtgaatctatgtgctattttatatacaatataaggattggcctacattcagggcttaggagttcaaaacttgtaaatattggagttgtggatcacaaaaagattggcgtataacagtatccattctcgtctgtcaataggtcggtgttggaatagataacaagccttgcccagaaacttggctcgcctcgggaggctaatctcacccgccctatctgatactcgtgaagccacgtgatacggcacgagcaatacgctcaccctctggagatccttatggaatatcgtttatcgctaggaaaggaaatacaagctggaggcaaggccccggcgagatttatcaccctgggtgtgtaggcgggcggagactccggtgagaattgtcaccccttctcgcccacactcaccgtaagtcaaattccccgcccactttagtgtctaaggtacctcaagaattggccgcgtaaattatggaaatgaaaataaataaagaaaggaaaaaacatacaacagcatgtttaaggtgatggtcacctaacgcccacggatcgggcatgggcggctccccgctctattcagggcactccgggctgatattcagcttgtatagcgaaatgtaacttccgaatccatatgattcagtcgaacctcgatggcactagaaagtatcgtctccgcctcggtataattgccctatttcctatgcgtaacgtgcagcgctttcaagtagtgtttcccaagtcttcagtgaatcctatccaaagggaggtctgtccgttacaaactcagcatgcggaaaaagcaacttgcatttatcccagctactatcaacccctttagggaaatgcacacagatgttcaattgaccttcttttgtgttcaacacatatatcaccttataacctacatatcatttagacacggatgtacacttgggcttcaagacttaaactgcagccacataggccattccttggcagtagaaaaaaataaaaacatacaacagtgaggattcgctggtggtcacccacccaactactaactcaccggcgnnnnnnnnnnnnnnnnnnnnnnnnnnnnnnnnnnnnnnnnnnnnnnnnnnnnnnnnnnnnnnnnnnnnnnnnnnnnnnnnnnnnnnnnnnnnnnnnnnnnnnnnnnnnnnnnnnnnnnnnnnnnnnnnnnnnnnnnnnnnnnnnnnnnnnnnnnnnnnnnnnnnnnnnnnnnnnnnnnnnnnnnnnnnnnnnnnnnnnnnnnnnnnnnnnnnnnnnnnnnnnnnnnnnnnnnnnnnnnnnnnnnnnnnnnnnnnnnnnnnnnnnnnnnnnnnnnnnnnnnnnnnnnnnnnnnnnnnnnnnnnnnnnnnnnnnnnnnnnnnnnnnnnnnnnnnnnnnnnnnnnnnnnnnnnnncttaagtacggctgagcggacgggaagccctgttttccacaccctatggtcgtatgtatgagatggtgaaggaaagagaatcatcaagtagttattaaatgcagagtaggaaccaaatcgcatgaaattgagtcaaactacacaatgcgtatgagaattcgctcgttgacattatcacttctgcttttccacaatctcttggtagcgatattcacagtagtaaggtcaatcccattttgagtagcgaggtcacgatctacgatagatcgctatcattatgtgcttcatgtttgcttgcttgctcgtttgttcactcgcttattgtttgcatagtctgctagtttgcatttcatagattgttttctagatagctaagcgagaaggttcgaggtttgcaacgtttgcaaagtggtcaactatatcaataggctgcttccaactttgtaacttgcttcttctttctctcctcatcttagttattttgaattgaatgccctcttcggttgcaagacctggcacgttacagcgagcacgaattcaatcaacgattgttgcggaaaatcaacgaataaagcaagaatcgctgggtaaacatctgatattcaagtatccagcttatctatgtgttcatatttaagcgctccgcttcccattttaataaaatttcagaattatacacagttggtatgatggttcaggctgagtgtttgcttttgcctggttaagcaatctcgtattagtttaaggcttcagtatcgtgagctgaagatttccgggtgaaagcgagactcgccatactagccagcgtgtcgggatggtcctcgccgagctttgtcttgcatgtctctattatctgcacctgcagctgctcggcattcgccccctaaccttcattacagtaaataattcctagtgttttccagatgaaagccttccctgtttccttggtgctaatacccctcaaatctatattcacacgtctgggagatgcaacatagagatgccgacgaagctgtggcttatggtcttctttgataagttgagagcatgcagcaagcataaacttgatgtaccacccctgccatttttgattttggtcgccacaggttaccctccactgaacctagctgtgcattgtggtaccgggccactttccttgcactcgctgtactagactgtagtgagccaggacatctatgctttcattatacctgaagtgcgactgccccccaagcctcgcacgactacttcatacgggatgtctctctcttcgtgtcgtattgttggttttctttccagatcattccatagctggtctcgttgtgtatagcttggcactgtctctgtcgggacgaaatagatgtgcgttggttttgtttgcgttgctaatcaagacatctgtcagctggtgttagaatccaattaaagcagatgatgggctgaccaatttttctttcgctctcggctttgagccatcttttgatatatctcaccacatcttcatacgtttcatcatttagagactggcatccctgaatctccctatgtaatctctctgctgaacgttttattgtcccttgaatcactgctgattcccggtccaccacctggattgttatataagttgcatatcgcatatgcgggggatttgaaagctcacatgggtgattgctatgccccatagaaattctctctgagcttcaaaaacgcaaagagtcttgcgagacatatccttttcgtagataaaagagtgaattcgatcgtataagtcgtcactagcatctgagccaactttcataactttcaaaagagcggtatctgaacccctccagtatccaaaaagagaaattatctctccaataggagtgagttttgaacctcgatgcggcgtgctcaaaaagacaaatcctcccagactctcgagaatttcaggttccaaatcgctattttgcaccatgttcaccacagcctgtttccctattagttcaactgaaaataacccgatgctgaaccaaccttacctggtcgatgattaaaccaccaaaactatagccaatcaaaatgataggtcggcttttctcctagacgaattaagtacctagattcaaatcgaaatcaagtccaatctcttacctctagggtctctcgcttactggcgagagcgtgaatcaagtcatcgcccaaatcttttaacgacttgctcagggcattgctcatccatctcgtatcgtaattaaaggccatgatgcgacagttcaaattttctttcggtaacagatcacgaacccatgacaccttttcagatgagcgttctgtagttgtcagtggattcgaatcaagaccgtgaacgtagacgatactgacaagacaattagccatcaacccatgaagagaccacaatttacgggcacaaactcggcaagaaaggtatctcgggaggtcacgtcggagggggaaaagattgtgatgcgctctcgcttcatacacacagagcctcggaaaagaacaacctgcaaaggggatagagcagcacatatcaaaaaattgaacatggtcaatagtatttttggaattgaatagttaggaagtgagaagatgtcactaatcagccatgaaagagtaaagagggaaaaactccacactcgatggaaaagcctttccgataggaacatagcccataaaaggtatgggatggtgattgtaaacagcatattgccaatacacagttaaccaaatgtaagttgaaaatatcacgatgaattatttgaaagagaagcagggggtggatagggaatgggagctggacacgaatttggcccctcagccaaaaaccgagtcgtcagggtgatatgccaccctaacgcatgatggcggggcccagatgaattatctcgaatcaagcagatgcattgctatcctacgtctgggttactgttaccattaccgccctagaggggccaggtggagtctactgattgcgagtcggacgtggtccgtatcaaccgtcttcatataaccgccatcgggattcatcacgtcgagattcgaggttgctctctagtctatatatagcacatgcgttagccccattaattgtgaggggtgcgatcatccgcgtctcagcttgcaatatttcttcatacacgaagcgttacccctcatcggcgaagatgttctcgctattctctcctcaggtctttccagcatggctccgttctccgagaactcacaactctgtgacaagctcacaataaccgccgatggccacttgtcgaggcgaaagagcaatcccatttcttcaactcaacaattgacagagaaggatcatcttcctggcgagccaaggataaaattggaggatgaccatattgtcaaaactctccagtccgagttcatgacgcgtaacctggacaaactttcgccattcctttggctggtcgccaaacaagatagtactcatatatcagccctcacccaccaaatcgtgagaggacgtgaagtgattatcacggaagatccgggcctccatctggtctggatctacgatcgagtcttcatcaagccaatgcccaagtatctcttatcgcacgcattttggcagttttacctcgccgacagaaattcaaagatcccaaagtatcagcaacacaagatcgctaaggcagttctcggattcatgcgctcgtatgcctatcttatacaccataaatcggacttcattcttgccaccaatgataatcaccgactactaccgaaaaaaatcacatattcatctttcgtcaagttcattactgcatttgaggagatatgtgacgattctgtgtctccacgctacaaatttggcgaactgcgtctttcccgtctgaacttttggaccaagattttcctcggacgtctcatgtatcacaaggtgcatgggcagtatggagcgtattttgcacgttcctacggcaccttactgttcatctttgcagtcttcagtgttttactcagtgctatgcaagtggcattagcggttgttccacttgaaggtggatggtcagtgtttgcatatacgtctcgtggatttgcgatattcacgattatctgtgtggctttgattataatatctcttctctcggtttttattgttctttcttcgcgagagattctttatgccgtgaatgatctcatcttgaagcggagaacgaagaaagttggcaatagtgtgtgaaagaaatgccgctatgatcctttcgagctacatgtaatcttctagactttcgtacagtacgcatctgactcatataattgaaggaggagcatgtcctcggttctaagatcatgtgactctgcggcacgagggcaggagttacattggacagtccacgccgagcattctgttggccctgtatggggtgcgggcgactaagtggatggcggcttcgggatggtgcgttgcccgtactcgtgatctatgtccgccgggaatgggaatatcttgagccaaagctggcagggaagtatatgtgatgttccgcttatctgagacttcatggatcagtacgctgacaagtatgatcttggttaaatgtgacttaaaatcaaaatactccaaatctaatcgcgaaaatgagaataattgtacaattgcatggactggcaagcaaatatcaaacaggaactgccatgcctgggcctttcttctcagcggtattcttaacaggatgaagtagcatagatggaaaacagagtggtccgtataaatcctctcgctagaacaagaccgagtcagctttaatgacgttatcttctcgaatgttcggggaagagaatgatactaaccaagtcaccgccatcgaaccaatttcgaccctgtggatcctggtgctgaagtgaagtgatattagttctgcaaaaaggcaaggcaggggggtaattctcacataactaccgtcggtaaattgattggggtcaatcgggtagcccagccatcgccggtaaaggtcttctgaggtctgggtagagaacatataagataatcgatagaggatgtggtcccagcggtggtcccagttccaaatactatcgcttcccccgttgattttctggggttcacctgggtttaagatgcgtccaagttctttggctgtccatttgccatcaatgtacacaggatgcggtacatggacggctttgaggccatgccagagggcaagtgaaggagctgtcatttcggaaacaagtcccattccttggatttgcagatcatgcatttgttgcaccaggatctttgatatgcgccccattgcaacgggagatgctcggcgtggagtattctcggacacaccccatagtctgttcgagaacgtccactttgtatctacggggtcgaagatcggtaagaaggagataaaatctgcttcttccccgacaccccattcgtacttatcgtcctccggagacggcgtagttggcttggggcctactggcgttgtatctgaggtgccctggggcccccaaacactgcctcggccattcacagaggagccgaccatccgtacaaagtcctgccagctcccgtgtatccctggaaggtagaaataggcgttgcgctcccagagatatttccgcggttgtctctttgcaaattccacggacttttcaaggaaatgatagctgtgccccataaatctggcatccatttccagttgccagtagtattcaaactcctgaaacgattgcgaaaatatctgaaccggttgccaatactggtaattggtgctgtgaatctgttagacgacatgcaatatagtgatcagcctcggaggtatcgaacctgtgttcatcgactttagggtaccaagttttcaaggtctcatcgttaaaaagtatggtcacgtccaaaaactcgcgtggcacaaagcgagacttaacagattgcatagcctcatcatcgtctgtatagggaatgtccttgtctttaacatgacacaagatgaagacctcatactcaccgccggagtgtaacgacagttccatgataagagatcgcacacattgtttgaggttctcagtccaatctatatcatgccacgcacgtagtatgacagccgatcttgatttgtgtttcaagtcgcgagtagcagagctcggtcgatcgcggaggaacttccttgaagaaagaggagggtggagaggaagaatagatttgatcgaatgagagtcagtctgcctcgtcgagtatcttgcggcattcctttcaacgcattgtaactgcagtgctccccaattggcttcactcaaatttatgtgtggttggggatcgtcactgtaaccatacgcgcccaatcgagagaagcggttggcacaagtatatgcatcaatacctattgccgcatacgatccgagtaagggcaagggaaaatctatcttatctgtcaaagttgtctcgccattgagggtgggttcgcaaatacctcgaggaattcctggataaacggagaccatatcttggatattcgaacgactcaatggccttcctcgtgggccgtcacaagcaaaaaaactgccgagaaactccttgcgccactggtcgctgttatagtcgggataagggtcatagactacaggccttgggggttcaggatcatcacttccatgtcctattgtcaaagtcccgccgcgataaaagttgccctccctatcaatcacgcgttaatatatacacaaattgggagtcagatggaccgccacataccggacatcacgtagagttccaagtccgatcggctcatgggcaaatggcgtttgatcatcttgtgggcgtacttcccgcgacccgctgcttactagatctccaggccgtatcacagtagacctggattgccctaggtcaggccatgagccagaaggaaagtactgcagatattcttgccttcgattcaagacacttccgaaaatgaacaataatagtatggccaacagagcaagatataatcctcgtgaataacgaaaaatattcaataatggagatagattaatgttggatcgtctcatcttcaaaagagatgccatttagccagactgcgatcgatatctgggtgaacaaaggaagttggtgaaaggacttgacaaagagagaatgagcaaagacaatgtccgcgatagcgccctattaaccatgcaagaccccgctagtgagtgccacttttccaggatccagggtcatcggcgtatcgcctgaaagcatcctagcaagcccggcttcaacgctaataagtctctgctggtctatattgtatttcgtcattcgataccaggacacacgatgcaaaaaccccttttcagggtcatgtcgggctggggaccaaaccgatgtcgcatagtgggtcgggtgagatcgctcgtgctagacgatgtacggaggagtaccagtgggctgtgtccagcgggccgctcggagcgaacagacccgtgtatattgggctaggctccacctattgcctcatgtctacagtgtatgtgttacctactctctatctcgttccctcatctgccgctgctgacatcgttccagatactattgactcgttggcacccatcatcccctattaccgcatgtactaacgattaccgtaacatgacagggacagggaatgacaaaagtacagcacggggccaatactacgcagtagcgtgcagtggcctgatagggttactgagagacacgggattccgttgctccactcagggcggctagatacatattatttcccaatgctcccttccgactgtagcgccaccaattcgccttctccccagctgaaacgaaatgtatattttgtatgctgatctgctagatacttctgatggatacattactactgcaggctttgtctgacctctgtcatatatgtatagttataaaatctactccatcaaggctggtagtctagatttgaggttgaagatgagcatgtaaatggaatgataattgggggcggcttcaagatgttttatcgtaattttaaattgacaggggtttgagggctctcaacccgggctggaagcgctgatcagttgaaggatgttgctcagtactgcgcaaagataaaacatatgctaaggccactttgttttccttgcgattctctgcttctgatatccttcagccccgatatagcccgggttttgaaagcggatttgaaagagccgctctttctttctattgaagcagcattcatacatcacttacactgacatggaatcctacttccgtctcaagggcctcgtccttcaactgtcgcttttgagtctctttactgcagtcttcgccgtcgaccaatgctattatccaaatggagcgacaagcacagataccccgtgttacaccgatggagatttctctcactgttgcgcaaacacgtctatatgtcttaccaacggcttatgcttatcaatgaagcaacctttctcgctgtctcgtggtggttgtaccgatagtacttggagaagcagccgatgtacagatatatgtggtaggtctgacattcatctaacataatctatatcctttatctgactcctgttatcagtcaaggcccaaggaggtgccggctcagctgttgtatggctcgacgggagtgaaaataacgcgacctattgttgcaactcagtccttgttgatccgttttctggggaaaagatttgtagcaacgtcgatggtgcaactcaaaccagttttaagatcctcgacggatacattattcccagtgccggggttctctcaaactttgaggaaatatccaacaatacatcttccttcgttgccaatggtaccgatacggctgtcactacggctgtcactacggctgccactacccctgtccctaccgctaccgctaccgctactgccagcaacgaaaacagctgcaatgagtctagggaaattgcaatcggtgcaggagttggggttcctctcgcagctattgctctcctatccattggatgggccttttgggagagaaggaatcgaaaattagcagcccttccggcagcccaacctactcctctatttcagccatcttaccaagtggcccgtggccacgagagctaccatgcatatgagttgaaaggatctccaccgaagcctgcggagctctacactgcctagccccgtgagtaggctatgacatgtgataagcaggtttattatggcttagtatttatgtgtgattgggctgtgggaagagagatactttagtgaagacttgattagagcattctataattatggagatataaatgagaataacagggaattgacactgtgactagagaggtgaatgaagatggtcttttgagtggtccttctagatgtccttcttacacatacagcgtataacctttgatgatatagttctatggttgagtcgttcctattcttaccgcagctatgattacgcgagaggaatgtttagaatataacactattcctatgagtatagattcaagatatattcatctttcttggaagctgatatatatgtctgggacataggtcatggctatcacgattttcggaagaatgcaagctcaagtcctcgaagctcattcgagccagcaagggccagtcgtcaggaagacccaacttcttgatttctcgacaaaccaagtcgccaacaagagcatggacattctgcttgtatttatggctggtgacatattcggagatcctaaaggactcaggaactattagaaatacatagtgaaatctgacagaaatacagttctaccgcataagtttccgcggaaatttctctataccgcctttgcgcaattacatccactatcttcaatgattgaacattgcttctaaagaatgatatataaaatattaaaacttacattcaatacgtaggctatttagctattacgatcatatttttatatatttttctcattagagatggatgtctagttaatgttttaagtatgtggattgaaatatatattttgacgattgggctggttcgcggaaacttttgcggttcgactgtatgcagtacgaaaaagtatgatgtaatttaacagatatgtaaagtctctacggagtactagctaggaaatgtcgaactgaacatgcacgtttctgtgggattggtcatcccgtttcatcccggatgagctgggcttttcacctggtctcatcctcgaatttcactatggatccacctcagtgttcgacaaaatcaaataaaagcccgatcatttgatttaatacggaagtgaagtataatatacaggaatatattatgcgtgatctaggaaggcctcgagtatcattattcgaataaagttgcagataccctttgaacagggaagcatataagaaattaaaccaatgatataagaccgaagacctcaattgcctatgtttttgtctctcgtctccagaaaacggttgcatggtcataggcactgccaaaagcacttctgtgtcgacccaaccgaacgtaatcaagcctcaaccgtgaaaggccacatcgctttcgcatcctccgcagatttctccccagaaaccttctcgatgtacaggtccagtagctccccattctgccttcttttctcgtctatatccaacggcggcgcaatccacccctccgcatcagtatcaagacattcctcagcaagcgcttgaacgtcatgccaggctcggtattccgcaaactgacgtccatgtgcatcgagctcgtcccggctgaatgaataagggcattttcctgaaaatccaagacttgaccaattctgtaaaatctctatcaagcattcgcggagcgggacaatgcccacttcggagatttctccgcatcgggtgaatagttctcggaagacacggggtacgttcatggcattatgcgctgctctgtcttcgagataggtcgagacctcgtaagcctttgctagttttacctgtgaccattcgcggaatgcaatggctttgctgtccttgtctagttcgttgaaattatcagggagttgcggttggaatattcccttgacataatcgtaagtctgcggaggcttcagaaatatcggccattgcgcctggagaaatgcggggagtatagacgttgactgaagatcgataagggatactattcttgaacattcgtctggggcgacaaagatatttcccatatgaagatcggtgtgccatagggtaggctgacaagctcccgttaatatttggttcgagtctaaaagcttcatgaggttcgctgtgacttccaagagctgggtttgttgttcaacggttcctttgtaaaagctcgatcggctttgttggcctcttgatattcgaagcaattcacgccgtgtaatggatattcccaagcttgaaattgaatcccctgtgaaatgttagtaggtgaactgccaggttgtataggtaacgcacagggtccttggtcaaattctagagtagtatcaggattaaacttcttatcgcaagaaggtccaatgcagaaagacttggatggatcgatttcatcaccgagagacctgttcggtcggctcatgtcagtccggaggtatagtcctccgtaagcagggaacgagatagccgacagctgagcctcaagcttggtcaagttcttgatcagctgtagcctttcgaattcagtcatactcctccatcgttcatatagaggaaccccggcagctttctccataactatatattcggcgccaacggcattcgaactatccgacgaccaggaaagaacacgagggacaggaatgctagtgtgtctcccgactgtacgtcttagccactcgactctctctggaataggaaccatcataccgtattctaaaactcctacttcaccagccgttgtcaatgaaggcggaccagcaatgcggcatggaattttggctataacttccgttccatttgctttcctcatcaaaaaagccttgctaaaccccccttccatcttctcaattgctgtgaccggactggaatccccggccgtggccacggtattgcaaagcgcatccacattgaaccggacatatcgtcggctgagctgatgttcttcatcgaccaggaaatgactattggtgtaagcgaaaaggtcctcacggagaattggtatgcctggaacatcagcaacggtctccagcacggacttcctcgcttacctcggcaggttatcgacaggggcccccctggccggccatgtcgcttcaacacatttctgagaattgacagcatttcgcatatctacgggcttgaaggaagagtgcgaataaaatgaagacgggatattgcttcttgacggaatgggcggcatatcattcttccatgttgtcgacgactctccctacttgtcaacaaatcaatctgttttgtttcgagtgccaatgccaatttcaaagttccataattcagtgaaataattgtagtagctaataatatgtatcgacttgaagtgctaggttatgctatacaaacacaatgtcggttcaacatataaacagaacacgaaatgtaacagcccaatgtatatgccggagcaattcaaaatataccaagcttagaccaaaagccaagctaccaacctaattcgacttgtccgaaaatgaaaccagagcatgataagactcagtcaaaggccacaacccctgagcaaaaccaagcgctccagcaacaagaagtacataataagccaccgtccacccaacacccaagccactgttaccccttaccccaacttggatactatcatcagaatcctctttaccccgagtaatagggggactgatatattcacccgcctggacccgtccccagaaccgcggcaatccacaccagttacagaaactatggatgagaaccacggccagcaacgagccggtccgcaaatagacaaaggtcgcataccagccaaaaatagtcgtgtagccaaactggaagagcgaccgcagcagggcggccagagccggggtgtccggatgggtcagacagaactcgtaaaagtggtgcacgtgcgcaatgccgaaatacagcggtgccaggaacacgatccggcccggcgaggtgtgtgcgagtaaatgcagcggtaccatggcggatcgaaacatgacttcttctgtgaaggggccctaaaagatattagattgaaatgttgttaaaataagggagggaagaaaagatggaaaacgaaaagcaattgcataccgcgacataatttctccagccaatccagccaccgagactctcagagagcttactacgacggaaccagaacttccattcgccctccacaatgccacgttcgaagagcgggccgaggaacagaaccgcggtgaggaaaagactccgaagggtctccagcaggccgacgggccaccagccgaggagtctgacaccggcgccgagagaggaattatcctcgatgatgagccagaggacgaggacggagctcacgatacaggatcccgtgacggcgcgaatgcgggcgcgaatcacggacggggcatcgcgactgagatttggcgatgggcgggttgttgatgagagatagaatggtaacacgtagagtagtgtgaggaggacctgatgggagttagatacgagattgtgaattgtggttttttttcttttcgtgttcatcgtgttcttgttgtttctaggagttctacatacagagagaaaagcaacggtatgttctgacagggcaggttcatctggattgttagtcgagactcttttttttaggattcccccttgactcaccctgcttcgagtacagactcctcagtcgagccattatccctaccggcgccatgatctgcagagttggggaggttgctatttatggggatggatgagagaggagggagtgctttgttggtgttaccgtacggggagaggaacggtgattggctggaaataatacaatacagtaatgtactgtcaccatgcaccgtggacgtgatcatggttgttcctattgttcttttgatatcgacagtccgacgttcatattccggtatatatagtcgatctatacatagcattgaccagaatctcggtttcaggctagacgaacaccgccggtttcaagccaaacctgattcgaactggtggaccgtgcaaaaacaggatgtgagctctcacccctggaattgtctgagtcaatgcgagggatcgtggacagttattctccgattacacgagggagacatttattggcaatgagcgtctgattattgttctcggcctgcattctgcctgtcagacctggaccgacgcatagatggagtagactagtggcagttcattggcagttcatcaggatcagggacaacgcacaccggctccacttcgattctgcgattaaatgagacgagatgtttcaaggagtcagtttgtgaatggctactccgcattcaatatggatttatatatttaaacggtagcccagggagtatgagatgtaaatatcaacagacagaacggacaccagaacagacaccagaacagaacatcccaattgcaaccagtccaaccagaagaaacaaaccaattgcaacttgtacttttgatctcatccaatcgttaatagccaccagactgtcaattcaagtgcatgcagcctgcataacccctgcagtctaagatctcacttgcctagacgctcaccgctggggcaacaaaattcctcccttccaagtgtctcacgttcttcttcgacttcgtgtgcgcctctgcttttctgtcctttttgttttgaaacgttttaatgattgtttttcgaccactctctttaatggccttggatgtttgaaacgacctaattgacgacttctgcacgtctgcccacactcttttgatgaacatcagcctatagaaccaccctggatatccaagggtaccacattccttacatcggatactcgactcggaaaaacaacaacactcttttgacttgtttacacatctggtttgccaattgccctttgccgtcgactttactcaatcagtcttttcaatcaatgctctcagtgtgtccgaataatgtcttttcccgctcgctcaacctcgccccgcgcgcgaaggccattgcacgagcgtacgccctcgcactccaatgaaagatcaccaacccgctcattacgcatcgtcccggatgaagaacttgatatgtacaccgcaaccccatttccgaccaagccggagcagattctcttgccgcttcccgggaaaggccaacaacaatacatatcagacaccggtttcagctactccgatcaccacctgggatcatccacgtcgacctattcctcaccggctttcagccacccggcaccccacagcccgcgagatcactcaattggtagctgggatgtatcctccaccgtggataccggcaactcgcccccgcagttgtgggatgacgacccatcctccagcaagtcgtcgctgccaggctcggggaaagcaccagactatgggtccgagagttcagaagcggacttctcagatgatgatatgggattgccgacgaccaccccaacgataaaagccgtacgctcggagtcaactatgtcgccaaaatcttctgccgagtccgtgactggctactccagccctatagttgaacaaatcggggccccgtcaagtcccaactttgtaatgctggataactcgagcatgaacttccattcagagtcggacccgcgcacaaactcgctctcgtcgtataactcaggaggaaccgtggttcggcacgtggggtctgcaccctggttccaaaacgccttccaaccggcctcgtccgagcaatcgagctatggatccccgtcattccactccagcccacccgcgcagtctatagcctcattccactcgagtccgatcgcgcaatccattgcctcgttccgctcgtcatccagggcgccgtcgggcagccgttcccaatcagcaacatcctcttcgcgcagtctccgttccgcttctgacttgcaggctgccatcgacaatggcgtacccattcaatacccgcgtattcgcgcgccatcttcaagctcccgcaccggtgcatcgtcagaacgcgacttcacccctggccctccatccggacgttgcaatccccacttggcatcaggacgctggaacccgcacctctcaactgtctcatccatctggtccgccgatgaatcaaccaagctcgctggagaagcagacacggactcagaccgcgatatggcagcgccaaccccaccaccaccagcagccctagcgacagaaacaaccagatcctccgtctggcttgtcgacccctccaacgacagcgaagacgaacgtctcgacagcctaaccaagctcccaaaccgcccggtcttctcccaaagccaaagtctctcctccggctcaaaacgaagcgacagcacccgcagcctccaacgcccaggcacaggatcaagcacaatcctcaacatcctcccaacctgggcaaaagtctactacctccgcgaaccaatgggcctaaactcaactctctcaatgatggacgcctcccgtccgccatccatccgtccaccatcaacccgcccaccatccactcgcccaccctcctctcgtcccggaacctcaaactcaagcatcttcaacctcgtcccgggtcccctcaacgtcccacgtccccgctccccagaccgtcccctccccgatgccccgcgaagccaagaaatcacccaacgccgcgtagacagcgacccgcgcgatccacgcgcccactgggtcccgtccccgcaacccgaagacggcgagttcaccagcagccacctctaccgcctccgccacagctggtccccgcatctcgtccccgaccgacgtgtcgtccagcactcgacgagtcggtggcggccgccctccctcgactcgcgctacgagcctgtcctcggccggcgaaatatccaggtctactcattctgcctggggttcattttcccgccggcgtggtgtgtggctgcgtttctgcctctgccgcctaagccgaaggccgcgcagatggtcgagtttcactctccggatgtggggatggcgcttgaggctcagaatgtgaatctgcagcagcggaggagggataatgcgcgctggtggaggaatcttaatcggtggatgatttcgctcggggttgctatacttgttattattattgtgcttgctgttattgggactaccacgggtttttagggctatttgttccccggattggactgaactgcgttttattgcggtctttttatttacgctcttacgacttggactttcaacactggtgattacttgatgctttttttctcttctttttcttcgcggttgagctcccggacagccagtcgactggtttcttttccccttgctgttcgctatattgcagacgtcttctccttgctgtgatctcttcttgattattgacgattcagccccttcttacgttcttcttttcgcttctctgtctgcacatttgttctgaacgactccacgacttcaacgcacataaatatccttctgttttacattctctcgacgtttcaacatttgcctcggatctgtctacggctttatatgtttgttgggattctatgcatggtgacagcctttgtttacatttatgctatacgtccgtgtattggatatatgtttttgttattgtgcttttcacttcttctcttcggcattctatgtatcacaatttacttatgctatactcaacttcttcattactctttgaaagtaattgaaatcaaatcaaagctcgcaattctctaaaacccatccaatccttggaatatctatagactgatctcgaccaaccatcgctattaaacataataaagacgaaacactcctactgttctataaaaaaagagtacaccgaaacgctgatccagaccggctattcaccccgcttctaatagtcacctctcactgttagatctcaaccaaaactgctacagcctacaacttccgcccaagcttttgctcaacggcagccttcagctccgcgcctgtaggcatcttaaccgtacttccacgtctaccacgggactcgatctcagccttgatctcagcaacagcctcgtcaaagtcacgctcgggatcattcggcaggcctaggtcaggtggaagcacggtgtcggtgcttacggcgttaggacggctgcggtgcttcagttgagagacgaggtattttctgagcggggagaaggaggcgaaggcaactagggaaacggcgcagttaaggatgccgtagaagtagaggcgggaccagacggtgacggagtcgtcgaagttgaggatgataaaggggatgacggcgaaggaaagggtcagctgtgttgccagccagctgaggatgtcgtagtagggcttgtttggtgttggcttggtgccgtccggtgtgaggaagaaggggcgcacgtagcggcggaagtctattgaatggtaagttatggagggagtggattatggaggtgtattggtgcttactctttgccgcggtctggataaacgagcccagtataaaggtcatgtagtatcctgggtggaaaccgtgccagagggcgctggtggcgaaggtagccaggctagcgcggaagcccggtttcttgcccttcggcgtaacgcggaggtagacgtagttgcgcagccagtggttggtgttcttgttccagttggctaggtaagcatgggaattctgtgccgtttccatcgcccacggatcgacattctgcagtcgattccagaagaccttgcctgttttcgggtcgaagctgttgtatcccatgccggatagaatacaggcaccctcagtcagagcccagacgccgtaatacttggtgcgagcggtgaaacccagcatgaagacagtgaaaacgcgacgcaggaaggaatactgcaagaaggcgtctgaaagcacaaagtcggtggtgaagtatgagctcagttggatgaaggcgaagatccagaccaacccggcggcggccttcagtgcagcaggtcttccgctgcgagggatcttacgcttcttccgggtagctggcaccttggatgggtcagtgcctggcggaacttcaaagagcgtagtgtcgatccaacggcgataatccacgtattcaaaggaaggaccggcaaagagagaagggaagaacaagacatagcccagatagtctacaatacccgggaatttcgtaatagcagagtacttctgcgaatccgagagttggtccttgggcagacggccgtcatgaatgttccagcagaatgagctaagtttcatgaccatgaccatctgcgctccagtaatgtcaacggccgatttgtcgttcgccctctgacgatcgatatggttaatcgacatgtggcccatcaggaaaaggaacccaatccacggcatcagtgatccatccacgtagtaggcgattgcataggtagccgcggcactgtatagtaaggtgcgtagaccatcccagaggtcgaagagtccgataatatagaacaacgaaacggcgataatgaagacattcttcttccagggttggccatcggggatacgtttgaggagggcggccagtgggtaggagaggaggaacgagccgatcagcttgactggagctgggggtcagcaattgctagcaattcgggagcttatggaaatggaagatcgtacgctcatcagttgatgcgccagtgagtttagctggcacctcaaatactgcggggagaagtgttagttagaccgagcttcccaagtttgaatgagggttgacatactctgatctacatagggcaacattgttgaccatgtagaagatgaaagaacagacaaaacagacaaaaaagaaagaagaagtcaaaaagaagatcagagcagtgaagaaaggaagaagaagccaaaaagaaggaaaagaaaacagctcgtcatgtggaaagtggaattccccccaacaagtttccgccctctccacattcagcccctcgatcttcaacagcttgaacagcctcaatcaggagctaatagccactttgaaaaaacttatttcctggtgaaatctccccaccatggacgtcgtcgcggctgcctcggggtacatctccaagatggtcaccgtgggtgagtccggaacctcgtcatccaagatgaagatcttgcttctggatagtgagacagtgggtggatttaccctggcaatatactgatctgattgctaacctaacccctatgggtataggtccctattgtttcgaccgcaatcacccaatccgcccttctaaaccacgaggtctacctcattgaccgcttggacaatgccgcgcgcgagaagatgcgacatctacgatgcctatgcttcgtacgcccatcacccacctctattcaatttttgatcgacgagctgcgagaacctaaatacggcgaatattatatctaccttagcaacatcatccgcaaatccgccctggagcggctggcagaagcggacagtcacgaggtcgtccagtcggtccaggaacagtttgccgacttcctcgttatcaacccggacctttgctctttgggcttaggtttcccattgcaacggatatggagccattcgccggatttatggaacccagattcgttacaaagagctaccgagggggtcctggccctgctcctcgcgttgaagaagaatccgcttattcgctatgagaagaacagcctactggcccggaaattggctacggaggtccgataccacatcacgcaggaggagcagctatttaacttccgccggaccgatacacctcctatcctgcttgttcttgaccgccgcgatgatcctatcaccccgttgctgactcagtggacatatcaggccatggtacatgagatgcttggcatcaacaacggccgggtggatctgcacgatgtgccagatatccgaccggaactgaaagagattgtcttggctcaggaccaggaccccttcttcaagaagaatatgtatcagaactttggtgatctgggccagaacattaaagaatatgtggagcagtaccaaaccaaaactcaaagcaccgcgaatatcgagtccattgcggacatgaagcgttttgtggaggattatcccgaattccgcaagctggcaggtaatgtgagcaagcacgttaccctggtgggtgaactcagtcggcgcgtcggtgaagataccctcctcgatgtgagcgagttggagcagagcctggcatgcaatgataaccactccaatgatcttagggtatgttcaatagttaaactgattatgctttgctcacggactcacccttcttctccagtcactacaacgaatcatcgggcagcctaatgtgccctcagataataagttgcgcctggtggctctctatgcccttcgctatgagaagcaacccaacaacgcgctaccaattctccttgatctcctcgccacagcgggcgaagtctcaccaaaccgcgtaaatattatccccaagctcctcacctatcaccactccctccaagccccaccagtcgcaggcgggttctctgacctcttcgaatcaacctccttcttctccggcgcaagcaaccggttcaagggtcttaaaggcgtcgagaacgtctacacacaacactcccccagactagaagtgactctacaaaacctcatcaaaggccgcctgaaagaactgcaataccctttcctcgagggcagtggacacacgcgggacaaaccgcaagacatcatcatctttatggttggtggcaccacgtacgaggaggcgaagatggtagcgcaagtcaatgccagttccccgggtgtgcgagtcgttcttggtggtacttctattcataacagtacaaccttcatggaagaggttgatgatgcagtgggcagctggccagaaccaggaccttcgacagctgcgggacggctgcgacgggaggttggacgataattgtgttttatttctggtgtatatgggtaatgggatagaagtatatcaagtaaagcctgcaatgacagtcaatttcatcaaatctagaaaaggaaatagttaacggcaacttatttcggatttgtcgctataccgcgccgtagggacagaaaccccaaatgcggagattcatcttcctctttctcccctcacctgagccacaccatggagcagacatccccaaaaggaggtccctcctctccagcatcacgcgaaccaagacttcatctcccttcaacaaccgatcccccgggtccccagaaccccgccaaaccgctcgtatggctggtatacaacccctccctaagcaaaaaccccaagaaacactaacacacccccagatcttcggcgcaaccggccacatgggccgctccctagtaaaaaccgccctcgccaacaatgacctagtagcagccgtcggacgcacctacgagaacagccccgcagcaatgaaagagctagaatcagccaactgcatcggactcctatgcgacgtacgagcgcgagagaccgtcaagcgcgtaattgaccaaacaataacccgcttcggccgaattgacataatcgcaaactgctccggctacggcgtcatcggcgcctgcgaagaccaagatgaattcgacatccgcaaccagttcgaaacaaacttcacaggaaccctgaacatgatccagctctcgctaccgcatttccgtcagcgtcgcgcggggagatacctcattttcagctcgacgtctggcgcgctcggtgtgccgggcctcggaccatactgtgcatccaaatacgccgtcgagggcttgatggagagtatgctgtatgaggtggatagttttaatattaagggtacgctcgttgagcctggtcatatgcgtcgtgatgatattggggatttggtttcgccatctgcggtcgtgcctaacccttctgaacatcagctttcgtcgcccttgccgctctacggccattttctggttaagccgcccagtgagccgtataatacggttacgtcgccggcggcgcatgcgcgacgtatgctcatgtggctgggcgataagcagcctgctagtgcggtaaaggcggcgcatttggtttggcagcttggtcattgctcttacccgcctctgaggctgattctgggtacgtatgctgttgagagtatacgggatcggttgaagtgtattattgaggagattgaggattggaaatatctcagtttcccgatgggtgagactttgccggttggagggcgtgggggatcttcttttccggagggagctgaaggggggagcgaattgggtaatggataattttgttcgactttgtcaacgtcttctattatacccaaccctgatcaaggagcctcttcggaggacagccgacctgcattctccggcgtggggtttcctatgtcgtgggaatgcatgacccgctacagagcttgtctggattctatcagaacaagagacttgctatatacctacggatgtcgaggattaaggagcaaatgatatgcgtctacgtatactgcatggatgctgcacaccacgaaaaagtgctgctttcttggtaaacccaaacctatagctccagaattgctctctgcttcggccaacgttactagcgcggaggcagacaaccaggctaatgggaaagaaacccaaaggcattcactccactaaacagactcttcgcggggagccagtcggtgatttcttgaatttctgagatttcaccggctcgtgcaaatgaaccaccagggcgagtaggcggatactggcggttgatgcgaggagagtcactctagcaaattcatatagatatcgtgtatccagtaaaccatctcggccagcgcagtatcccgagctaggacggcctcatttgcgagttacggtccaagtagttgcaaactagcataatcctgaattgaggtcgttatgatcggctcagacaggcttgtaattatatctctcaaggctggaaggatcattctagagtgtgcattgggaatttccttcctggtcgatgcacggaggactcgaatgtggtactcttgtggataatgtgaaagaagtaatctgttgatgttagagtggctcttatgaaccatggcctgcgaaggagctagtactttgccattttggtggctttcagaaccactccatgagcacggcgctcataacctctcggttctaggaggctcatgggttgtgttcatatataatagtgatgacatcgtctaggaaatcctcttcttataaagtctaaacctttgtaggaataatgatggtaagagaaatatatgaagagggaaaagaggaagatgccatttatagccatttatagccacacaaggcatgatatctcaggcgttcggcataacctcctgtaaaagaaagagaaacaaagggagaagagaaagctttatgcaatacctatcaaaataatatacaagtctatccaagatagaaatagtaatacaaatcccacatcttataccaaggtatagggaactcagaaaacgacattgacaagtttaccccccttgatgacaataacccgccgtctcttctcccagtcattcttctcccgaagccacaacttcccctcagaagtctctaacactcgactgatgatccaatcctgttcttcctgcgaaggagaattcttgccctgcggcgatgctgtcaccggagactccatacgcggaatggtcacagcacagcggagcttgccgttgacctggacggcgaccgtttggccgccgcgagaggagagggtttcgacttggtcgggtgtgaggagggtgctaggccagggggatgaaaggatggatggcactggtgttgaggaggtggtatttgtgcttgcgtgtaggacttcccatgattcagaggctaaggctggggcaatgggggctagtagacggaggagtgatgagacagataggtataggatcagaggggaggaggcgggtgtcgaggccagggtgttggtcagcttgattaggtctgagatgactgtgttcagactgtaggggttgctttcgatgcaagtggtgacggatgcgatggtgttttgggtggctaggacggcgcctgcatcggagtcactcaggtcctggagtgatgacggaaggggggcggcatgggtggtagatgatttcagatctgcttctgagacggagaatgatgcctccgttagagtctgctgggtgtcttggacgagtttccagagtcgaccgaaccagcgctcgacgccgacgaccttggcttcatcccattctagaacctcgctgactggtgcggagaacaggatgtgcgcgcgagtagcgtcggcaccatattttgatgttgtgctggtaggatccacgccattgtacttgctcttggacatcttttcgaaggagatattaggggaagcttgtgttccctttatcaaaggcttgtctggattggtcaggtcaacttccgacgggagaaggaagcggcctgtcgaaggctcagtgaaggtctttccatggaccataccctggctgagaagcattttgaatggttccgcgggtgcagcagagtccctcgttgggagcagctcagacgagaggaatttgtaaatgaaccgagcgtagagaagatgcagaatggcatgctcgataccaccgatatacacatccactggccgcatcaccgcaggagagaacggggcttccttgttagcatagtccaagaatcgcaagaagtaccaggacgagtccacgaaggtgtccatggtatctgtgtcacgtcgagcgggaccattacaactggggcattttgtatggacccattcacctgaggattccagagggtttcccttctttcccttgagccactctccctcgattttcggcagcttcactggaagatccttgtcgggcaccggcacaggaccacagtcaccgcagtggatgatagggatgggcgcaccccagtatcgctggcgactgatcaaccaatctcgcagacgccagctctcaacgaacccagcctgaccgacttgctccaggtcattgacaatcagttttgatgcctccttggagtgtaacccttggtactttccgcagagcgaattcaatacaccctcttgcgtgaaagcttttgtgtctgacgtcgggacgacgctgcttgcttcattgccacttggctcagcctcgataacaacagggatcgaatcggggttcacattctccttaaagaacatcatgtccctgttatcatggcccggaacgcccatgactgctccctcgccatagtcgttaaggacgtaaggagccacaaagacaggaagcttcctcagcaagtggggtgtttctgtatcaattttgcacaatggatgagacacctcaatgtcgggcagccggtatcctgctttggagtccggtgcaagcgacaaggaatcgctcaggaatttgcgaagtgcctcgtctttctcggcagccttcaacacaatagggtggtttaaagaaagtgctagatactccacaccatacaaagtgtctggtcgggtagtgaatacattcacatcgatttggtcacctccaccgatcgtcacagggaatgtgaccttggcaccgtaagactttccgagccaattgcgttgcatcgacaggacacgctccggccatcccccggcaagagaatcgaggtctttcagaagtgcttctttgaaatcagtgatcttgaagaaccactgcttcaggttcaacttctcaaccttagcgccagatctccacgagaatccattggcatcaacctggacgagaattagcgcaaatcaagttttgccctttgatcccgactcacctgctcatttgccaaaacggtcttatcaacagggtcataattaaccaacgcttctgcttgatacgccaaacccttctgatacaacatcaaaaagatgcgctgagtatgctcatagaagtccggtgaacacgtagccagttcctaagccacaagtatcaattagttatcttagcggccgaatcaatacttcacataaacatacccgatcccaatcaaaatccgccgaaatgcacctcaactgctccttcatctttgagatattctcctgcgtccacaccgcaggatcaatacccctctcaatcgccgcattctccgccggcagcccaaatgcatcccaccccataggatggagcacgtcatgtccgcacattttataaaaccgcgagatcacatccgagatcgtgtaaacgcgcaggtggcccatgtgcagcgtgccagacgggtatgggaacatggacaggatgtaggatttaggtttctgtgttgtgtcgggtgttgagcgcggcgtggcgcgctcgctttcccattttgcttgccattttttgtcaagggctgggaggtccagtcggcgggttgctgtgctggctaatcgggtaagtgtgtagactggtgagagggctcgtagggttgggcgcgtgtgaatgcggccaggcgcgacggcgctggttaatcggagtcgtgagagggattgcatggctagttggtcattatgtgtctaagatatgcttagatattggggtaattggcgcgattggtcatgtccgcgatttgaacgcctgacttgtctgcggatcttcaaaacttccccggagcccggatagctttagccccgatttggactagcgtatcaacgctattccagaagccctagatatgaagatgtcgagtcttttgtacttgcagggaattaatatttgggaatgtatttatgttcaatgaatatgcatatcctgcgtcgcaactctctatatattgtacactctactctatactaagtctacattctcaaaatatcaccactcctatcaatgccaccccggaaatgatccgcaatcactttccctccgagaatagtctcctcgacaagcccctccacatgcttgggctcaatacgaccgtaccaaatccccttacccgccagcgggtgtggctccgaagaagttcccactatcatcttcggtggtatataaataatcacattgcctgcgtatttgtgtcctccaacatgactgatcagaccaatattagcgtgcttagggccatccaccgtagtcccatcactgtctgcggaagtgaatcctcgcgcttgcaacacgcgcttgaactcgctttccaacgcgggggccatgagaccacagcgcatgtcgcgacctccgtgtccacatattaacactgttggagagtgattgatatcgataacgcctgggaagtgtgatgctagctccggggatcgggtcatttgtgcttgtttggttgcggagagagaggagtgcatgttgtggagtcgttcagggagaagatatgcgcgcacgaaggtcgtaaggtcggttgtttggtcgggcgatgaggttgtgttcacgggtattgagggaatgtatttgaagctggggaagaggaacaccgaggcagaggtggaggaggatcctgcagctggtgtgatagatgaatttgtgaccaagatattgttgaaaggctaaagcgatatgatcctgtataagcaagagcttgcgcattcattgggttagttgaaccacttacatcaagatatggcccgccacgacctagcaggctcttcaatcctctcacaaggttaccccagcctttgttttccccatcattctcaatgcgactcgtccagtctggctgtcccgtgcagacgagaagctgctgcgcgtaggcagccatcgtcccatttaaggcttgttcataatcaatcggtagatcctccggtagagcgggcgtgggcggacaattgcagcttggttcggggcatgtcttggtaatggggaagggaggggggatttctaggcgggcgcggagtctgctactgcgctgaggggtagacagtagacggattgtctggcagtttcgataggttcgcccgctccagtcgcgcttgagcgattgcacaagtattggtcgcattataatagatagaatgtatacaatttcaaagaacaaaagtcagaaaatagaaagaaatagatttgaatgtccgagcgccgagtccgagaaatcggagattcggagattatcaatcgccgccgctgattcgttgatctgcgcagattatgctgattacgtcataatacaatcctaacaatcgcaatgttcccaatcatcctcatcatcactgtcaatcaggatcccttggacaaatcgaccgacaacctgcaagaagtctcgcgtttgaggcacatcatgagtcccacagaatttgtaaatctcgacattaacgcaatcctttgctaacgacaaggaccgggatggatcaactactgcatctaaagatcctatgacatggagtattggttctgatcttggggtaatatatcggcgcatacgcagggtgtgctagctgaaaactgcttggcaaatagcaaactcgatcggggggtgatctagaaaatggaaatcataagtcacttacaaatagcggcgaagacccgggagtgcttactgtgagattgaagttgcagattgatactttcttttcaagaaggtatatgacaatagcagccacggcggcgcctgatgagaatcctttggtcccgataaaaggtccatgtctctcaagaatatcagaggcacgttgaatggactcttcaagagctttgatgtctctggatctccatcaccccaggcctgcttgtcgtctttgtgccatttttctggatcggctcgcagttgacctaaagggtaaaaaaattcaatgttgcttatttggcgattatggtcctgctgcagggttttgagcacggattgctccatatattgtcgtatgaatctagttttgcattagaaaaactgtccagaatggctgtgccctaaattgcatgggtaaactggctgcttggcttctacgggaaagacagaaggacagcgctctcaccatgcaacatgaggattttaccacatgatggggtctgatcgaataatatagttgagttcatagtgatagttcccagtattaaagggttcggcgatattctctcgagtgtttagatgttctttaatggggactctttgaaattaaaatatatattccaaagccaaatgcatatacgaaaggtaacacatagtctattgtgcaatgtaggtcgacatcaagtgcatggcgatgcttcttgtgttaacactatgcaatcaatgataggttcatcaaagttgtaatgttagataaagtccatttgcagcaaaactcgacagataatgtctgcatatttcccttctcagacaaatcattaatcatatgagccctatgttgcacaggaaatgtagactggatgtcattttgttaagatcgacacgcgggtatacaatgtacatcaatctttacatcatttgaaatatgaaaacacatccctggaatgcatcttcgtttctactattcattttcaaaatggttcaagccgatggaaggacttctgtcatttcttagcatccgataccgctaggcagctggtaatgactgaatgtgcgccgtatctactcgtgcaagcaagcctcccggtgtccccgctgcctggaatgatcccaaatctgaatttatcaagatgaagttctgtggcaagggtttgcaggttctgtctcttggactgtcagttatgaaaataggtgtattgtaagtgtgccgaatgagggacatggtattcctgcagttcaacctcgggactgtcgcgcgctatggctgacaaaagcactgatgccgtgcgagatagtcggcacatacatgcctgcgctcatcttggcacgcttgtcagattaatgaaaaaagacgcgctctcttgagtagtgcagagcgcaattattgtgtgcgtatatattggttattttgtcgaaggcgagtatgattgaggcggggaatatgtgagctcgacctattggtatgatccacgtgttgaggtccaggatgaagtgtgcgggaaatgggcttgcgattacttctcatggacggcgaaattctggacgaggtctttgtggaggaggcagttcgtcagttagtggatctttttgtccggatctaactgtgggtgtgttgaataaaacaggtgtcaatagatggttgtgcatgtacaatgttcgaggctttaaagactgtaactgtccgattttggaaggaaatcacatcacgattccatattgctggcgatagcacacggaggttgaggcgcatcccggaagttcgagggtgacgaatcgaactgaatggcccccgcactgatcatgcgataatacgatatgcgccgaagccccggaccatcgtctcacgtatgcgacttgtaacgaaatccatggcgactatgcagattaactgaatgatcaagatttgagtaggtaatttttgggatcggtggtgggttgcaacggtagttagcatatcgtacggcatcacgattctctggtcatcatttcaaagttcggttttcgacaacgtagcaatgcgatccactgcccgatcggggagcaactcgaaacatattgtgcttatcccaattaatttgcagtcctgtcaaagagaccaagtgcgctgcgaaaagatagatgaatccagtcttcgacctagataaggggaattaagaaatccacccatgctcgagtccgtctatgatgcggtcatgctttctgtgatctccatgatctgatccggaagctcatcggtggatctggtgcggatccatggatatttctccaaaacctcctcgcgaggaggcaatgtacattatgggtagctctgtaggggagtagcggggccggagttggagaaggtgacagggaggccgaatatcggcagaagtgcgggaattgttcggcatggctcctgaggaggatgccatcgagtgctggggaacttggagtgttttagtaccttgtgggatagtatttacaggagcctgcaggttggagatgctaattattgggggtcgactggtgtacggagtatctgagttgcgtatacgaaattggttgggtttgactttacccctcattatgtcagcagatatagttactcctcagcggggtaacgctcggatttctgatcggctgatgggctgatgggggagagatgggaagaaccaaatagttagtgatatggaatactacgatgaagatagagagagatattacgaggcatctgatccactacgagtgcgtcagttgtatgtgtaactgtatactacaaaagtgcccccgcacgttcacccattgagagctttccaagggttaagttatgcaatagtccatgggtgatagcatagcatataaaagtagaatatacacacatgcacatatataatatgcgatatgcaatatgcaatatacataatacctatacaagtggatatggcaagctacgcaagtccgaaaatgataggccatgaattcaaatcaatgtactccgtcctacattctgtcctctgtccctcgtgcggagagttctccaagtggattcgctcccagtttagtccgactctcccgtttctatgcgacttattctgaggggacaatgcttgtctttgtagcgagggggatatataacctagctccagttgctgttcggatgctttctttcttctcactctatccaactctcatctcttcaactctacctgtaagtctatcctttaccatcttcctattccactatttcccttatagtcacatcacattccctgggttgcaagattccccacttctccccttcagagcttgcaaccggttttctccaacgctgtttttggacgctgacctcatcaactatttataactatcgatctatacacgaatgtatataacggagcgctaaccttctttttagtgatattttgaatatatcttataaatattttatatttcttcacgatggtatttactcgctctcttacccgtcaattaggacggcccttcctctcgagctctctcaagccaactgttgcctccagttccttcgctcgggcttcaccgttggctggctatatttccggtgcacgtacactaaccgcaacttcaaacctccagggcaaagttcttttggttctttacgatgtaggtcattctcacttcatacttcctatacttcaatcgctgacccggtcttgtttgtgatatagggtggtattcactcccagcagcagcctcagctgctcggtactaccgagaatgagctcggcatccgcaagtggctcgaggaccagggtcacaccctagtgaccacctccgacaaggatggcgagaactccactttcgacaaggagctcgtcgatgctgaagtcatcatcaccactccgttcgtttctgatgtgcattattttaaaaacctccactgattatataacagcttccacccaggttacctcaccgctgagcgtctggccaaggccaagaagctcaagctcgccgtcactgccggtattggttccgatcacgttgacctgaacgctgccaacaccaccaacggcggtatcaccgtcgccgaggtcaccggatctaacgtcgtctctgtcgctgagcacgttatcatgaccatcctgatcttggtccgcaacttcgtccctgcccacgagcagatcaaggccggcgactggaacgtcgctgccgtcgccaagaacgagttcgatcttgagaacaaggtcgtcggtaccgtcgccgtcggccgtatcggtgagcgtgtcctccgccgcctcaaggccttcgactgcaaggagctcctgtactacgactaccagcccctctcccccgagaccgagaaggagatcggctgccgtcgcgtcgacgatctcgaggagatgctcgcccagtgtgacgttgtcaccattaactgccccctgcacgagaagacccgcggtctcttcaacaaggagctcatctccaagatgaagcccggtgcttggctcgtcaacaccgctcgcggtgctatcgttgtcaaggaggatgtcgctgaggccctcaagtctggtcacctccgtggttatggtggtgatgtctggttcccccagcccgcccccaaggaccaccctctccgctacgccgagcacccctggggtggcggcaatgccatggttccccacatgtccggtacctccatcgatgctcaggtccgctacgccgaaggtaccaagaacattctcgaaagctacttctccggccgtgaggactaccgccctcaggacttgattgttcacaagggtgcctatgccaccaaggcttacggtcagcgcaagtagagagccctgtgtgattaagtatgaagtattctccgggtgagagacttcgtttcatatttcttgttctttattcgagatgttcataaaagtcccaattgctcccgatggcatgggcaatactgaaaataggtagcatctttcacgataccaatgaataccatttccaagctttccttgttttgcacttgtctttgaaatttcttacccaatatgtaatcgcgaacaggttgtttctttttttggacgacgttgcttacttcgccgtgcaaaaagcatgggaccgagacacgggtgtcactcctccatgaccagtcgcgtgacaacaccctggcataagagtgtccaagctccttatatggaggaccagggaggcacagagagtcaccgaggcctccctttggttccacccaggttcctttcatcttaactttatgttgaggtggttactgactctctgttgcctacagtctgacgtttggagttgctgggcccttcggcgctaacggtgcccgcgattgttgcgagcaccgaccgcccgggcactgccagcgtatgactaagcagccgaacatgtggctcagtcagtctaactaacgccacggaacacccacgcctcaaaacttacataaaccactcccgctcaaacattcgaccacgtcccctcacttctccactttctactccacactacggaggcctccagccgccatgggtgacttaattactattggtcaatattgcctggcagaaaatcagtcatacactcaacttgattcctcggatcgacccccctaccattatactctttatcattaactgctttataataaattgctttatcaactgctttcattaaatcaaggagttatagggatcagataaaacatacgaatttttctaattaaaatgcatgtttatttctatacaatttcaaactactccgtagaatgaatgtatgtagtggtagaacatatggcagaatttcgtattgtacctgattaggaaagcggtagctggacttctaggtatttcaaggtacccggttcttactaagtaacctaatccccattcgggtattaggttattacggactaattaggaaggcggtactaaaacaactcaggtataggggtataagtaacaatcccctaaattaattctatcaccaccaataatagagatagtttaattcttcatgttgacaattatcatctacgaagtatgcgtgtatcaattaaagaaggcggagagaaaagcggtaaagcagttttgaccaatagtaatttagtcacccatggctatatctacctccaatcatcctaaaatgcctgtcagaatccctcaatatttttcttgttttagccccgctgctcgccgttgggtacccgtggcctcacggcccatccagagtcccggggtgcaaagctcagcccaaggaaacactcctagatctcatttcaacatagtctcttggaacattgactactccagtagctatcccacacgacgctgccttgatctcatcaaccacgttttcaaatatggagttcctgacattctctgcctgcaagaggtcaggtccgaagttcgtgccagtctcttaggcaaccgcgaaatacgccaagctttcctcacgacagacgccgcgacggacctagagtacaagcgtttcataaccatgaccctgctgtctaaagaacgcttcgcgtatagcctagactcgaaggagatgggtggatcaaacgatgaggggaagttcattgtcgggccggtttttcgcgagcacctcccgagtgcagccggtagggatggactttgcgtggacctcatccctccttgcgcaccggacaccttcctccgaatcataaacgcacacctcgagtcgtgcgatggcttctcctaccgcgctgcgcagctcaagcaactttctagcgtccttcacgaacctggctgcagtggtggcctcattgtgggcgatttcaattcggtcactgatgacgatcgcctgcttatcgaggagaacaagctaaaggatgcatggctgacgttgcacggcgatacgaagccagatgcacctacgtggagtgtggggaggaggagggaccctaggtacgagcctagcaggctggataaggttgctatggtaggattggaagcggagatgatggagcttatgcatcctctctgcatcaacgccaccaagccgtctgaccagattgagtggagtgaccacagtggactgaggtgtaagttttgcgtctaaatgtcgttgagcaagatggagatacaatctgcccacgaccgtgaggactccatgaagggaatccgtgacttcgatgacattatgtccctcataaatgccggcgacaatgtccaatatactcccaaggaaagagagaagtacaagagagcctttggggaattcgtcgagacctacattgagcagaaccccaagtggaccctcgctcagtggaagaagaacaccaatcttgagtaaggattcgatggcacactcattgtaactccgtcttcctgggtacgtcttaatgattcagtgcatctatttttctcggatatcggatggccttacgccccattatatcgctagcaacaaatcccaaacatccgtccataccattcttaacatttccttggctctatcgtgactttcctacgcctccctgatccggcttgagcttacatggaagcaatgaattcactggttgtggccgtgtccgtctgatattgcctcccttgagtgaatcaactcgatacttcagtggatgctgagccagtagagaccgtgattcttgacacactgtgcagataacgagaaagaaaaaggttgaaatgttcttattaaaaagctcaccgaaaaaagaacgcgataatgcgcctcaccatccttcaaaaggctgggaccaagacaagtagcatccacgtgagggggaactgtcgtctctgcgagcatccaatcagctttattcaattcctctgaaagtgaaccagcacagagtcctggttatgcattcgagtcacagcatcccttcgctcatgaatagaaagcagaggcaccatgctctcggagtcctcgatctgctccggtgtacgttgctggtctttaggagaggctaccatgatgcctgaggatagatgccttgagaaataatctcaataatttcttgcatgagtcaggttaataagcggcaaccctaagggggttttcgcttgagcgaaaataactacaacatcgtatgttatgatatgcagagcatgaggatcggtggagctatgtcgatctcaccggattaattgagtccagcccttcggtggagtctagaacgtgtacggagtagagccgatgtctttttttagacattcttgatggccaagtatgattggtagcagtagggtctaaatatgtatatgctatcaatctataactacatacaagtacaaaaaaggacaaaataactctattcacaaactcgccacgcttgaaacaccaaacctgtgagcccagatcatacaggcctgcaaaacatccatagacaaaagctccaaccccaagaatgcagatatgtatatgtgaacgtgatcttcaacgtttcaaagcctccctgcccgtacattcccatgcccctcactcccctcctcatcactatcatctataaacccctcctctaaatcccgacttaaacgactatccgtctcagccccggtatcacgtctctgttgctccagcgcaccccgcctcatagaatccctatccatcccaaccaagatctccccttcctcgtcgtcaatactgatcgtatcgtggtcggctacatgcgcgccccaccgccaccgagagggaaggaagaagtgcatcactttatcggctatgcggtcgcgtagggatagtgtatgtgcggatatagtatgtagtgggagatattgcgagtagcgctggtggtagcggcggaagaaggggattatgacgcatgaggctaggatgtagattgataatgcaattgcggctgggatgaggattgtctgtatgtgggttggtttgtcagctttgtgttcttttaggtcttggtcctagtcttcactcttggtcacggagtaacggtgatgtgtggcttgcgcgtcggaatagggggttttgtacacaccttggcaaagacactggttgatcccatgctggatgctgggaattgggcttcaaagcgcacctcagagtcgatgatagagtggtgaggtttgagggttccaaggtttgcgcgagagattgcggagcgaggtccacgcggcaggatcggcagatcgacaaacgaacggccattcgggatatcagagatgtcacttttgttgatattttttgatatatcacatcattaccttattcaaatagtatctgcttcgtagaactagactacctgtatgtaactaataatagtacataaaggctaactaatgatagtagtatataaagacactcttaatgacaacatatagttagttatgaacatctatgccgatgagtttacctatctaataggtagtctgagtctcatataacatgttctcttagctcattcactgttcattcccagatctcctttacgagcctatcattctttctagtatacgtacgcatttgctagcaggcgccaacgggctcgtagtgttcatagcttttaatatggttaaaaatagccaccccagctggttagcgctattatctatactaccagactaacatataaagatcgtaggctcacatgggtcctacactaccggacttaaaaagccattcaagttacctccactctctcttttactccgaacaaagaaggagtgtaaaagaaccggctatgtctgaggtaggtgccaaatgaagatgtatatcaggaatagatatagtaaatagtgagggacttgttctagttagcttacaggatgaactatggacatgcccgaagtagtttagtggcagagtatgtacctatcttctgcgagactacacacttactgatcttcatatgatgctgacatatggctggtattatggcttagtatccacgctcaaccaacactgaggtattttctctttgaagctccgttcattccggtccagtggacgtcgaccttggaagggtccaagtataagcttacgtgatcttgataatcacgtgcacggtcggggagtttctccgggaagccccctaatatcaatggaacgattagaagaacgctcgggcttcgatcctggcgtcaaactggacttgacatttgcaaaaagcttgcatgttcatctccttctctcctattttgctttctttgtggggtacgtgccgtgaaggaagccccttacccctcagtctctcgcgcctccgttgtcgcaatccgggtatactaactagcactagccagggagggacaaaacagagagtaacagagagccactttcgcccactttgaatgtcatcatcttctccgatatcccttgcgatcgacagcgccttatcgcgaaatagggcatccctatttaataccgttcctgagagtgttggaggggcccttatgctgcgccctgcctcatcttattgacgcccgccaaaatgcccaccagttcacaagccgacaaacctaagcagacatcgagtggaaagtcgttcttcggacgaaagttgtacaaagagaaaccgaccgaggaacgatatgatagttatggagctccctacgatggcctggcacctccgggaagcgcgggctcacgctcgtcccgccattcgaagcggtcttcgattcaatctgtcgacatgacccaggatttcgacccaagcaatatcgcacacacctcaggcgtcatcacctccatcccctttgaaagcctccccaccgataccaggaccccaattccaatcgataacatgtctcgccctagctcatcgcgccacgagccttcccccaaccatctgggcaaagctggaaatgactatcatcaatatcccaccgtgacctctacctctgcgccaaatgggtacgtcccatatcctggacctcgtgcgcacccgcacatctcgaataacaccagctaccccggcagcaaccccggcgagcgaggtgccagacaacaacagcagcagcagcaacaacaacaatatcagcagcagcaacaatatcagcagcagcagcagcagcagcagcagcagcagcagcagcaacaatggggacggccaggcagctcatcagcgaacaatgggcctaaccataactcctattctattgattcgtcctctaactcccgcacctccctcgaccaagccagcatctattcctccgtttcttctaacacgcgcggttcaagctacttctcctcggacaattcctctcgcactctcacaacctcgcattctagtgaccgtcccgccttgtttcccagttccagctcgggccgtttgtcaaatgcgggatcctcccaccagatatctgtaccggccgctatcccccggccacaagataactacctgactcgaccgagagatgaccgcattgtggatcagctctttctagagctgatgcagaagcgaggatggcaaaatcttcctgaacaggctaaacgacagatgttgtcgtaccctgcttcaaagaaatggacattggtgcatcaggatcgcttgacagagttgcaaggagagcaaaaaagacggcaaaatgcgcgacaaactcacggccatgacggcatgtctggtttgcttgaacgtgctgatgaagaagggagcccggaatggtatgtgaagaaggtgatggatgacaccattacgtccaagcagcttgctagtttgagtgtcagcttgcggacacagccaatcaggtatgcaatacccccttttctccatatcgtgcgtatcactaataactaaacagctgggtgaaagcctttgttgaagcccaaggccaaatcgctttgaccaatgtcctcttgaagatcaacagaagaaaagtctctggtcctgtcccggctccccctacaggcgataaagatctagaccgagaatatgatattgctaaatgtttgaaaggtctgatgaacaacaagtatggcgcagacgatgccctagagcatcaaaatgtgctagttgcactcgttagctcgttatcatcgccgcgcctcaatactcggaaacttgtcagcgaagtcctcactttcttgtgccactggggtgatggacaaggccacctaaaagttctacaatcaatggacaaggtcaaacatgatcacaatgagaccggtcgcttcgatgcttggatgcgtattgtcgaggtcaccatcgacggccgtggaaagatgggaagtttggtcggtgccagcgaagagtaccgcagcggaggaattggcatggagaacctcctcatggagtatgcagtctcaaccatgatccttatcaatatgctggtggacggagcagaaacggacctgcagctccgttgccatatccgcgcccaattcacatcatgtggaatcaagcgtctgttgacgaagatggagggattccagtatgaggttatcgacaagcaaatcgaacgtttccgcgataatgaggccatcgactacgaggaccttctccagcgggagggcagcagcatgaaggatagcatcgaaggcgaagttaaggatatgagcgatcctatgcaaatcgtcgatgcaatcacgtccaagatcaacggcagccgatcccatgactacttcctctcggctatgcagcatatgcttctcatccgggagaactccggtgaggaagggctccgtatgttccagctcgtagacgccatgctgagctatgtggccatggaccggaggctgcccgaccttgatcttcggcagggcctgaccttcaccgtgcagagtctgctagatcggctgcacacggatgctgaggcaaggcgcatttatgacgagtctcttgaggctcggcaaatcgccgaggctgccattgctgagcgcgacgagatgcgagcgcagatcgagctcggtgcagaaggcttggttttgaaattgcaaaagcaaatcgatgaacaggctggtattatcgaactgcaacaaaggcaaaatgaatcgttcaaggccgaggttgcagaaatacaaaggctgcgtgctcaggaattgcaacgcaatgagctagaaacccgagaactatacctcatgctccgagatgcccaggatatcgccgcttccaatgcccgaaagaccaacaaccatgatatggcagaggcggcagatccatcccagatgcccggtatcatggaccgcgaacgactcatggaacgtctagaacgccagcttgagcggacaaagacccagtttaagctggagggcaaggtctggggccagcatggaccatcagatcgactccgcgagctgcgcgagaagatggaaggtgaagtagatgacagtgagtactttgctgagtctacccgccgacacctcgaccctggagctttgggatctgtttaccgcaagcgcagccatatccctacgatggactcgactttggaagacgaggaggacatcccactagatagcaatggcgaaccgatgtatgagaggcctcgtctggtggaaatgcatcgtcctcgtttgaacgctgcccagactaccggcttcctaggcgagcttgcttccaaggttcccaggtttgaggctgaagatcccgatgttgttgaaggggaacaggtacccaagctagaagataatgaagctgctacaaaggctatgccacctcctcctcctccagggggcaatattgttcccccgcctccgccgccgccgggagttatagctcttaccccacccccgccgccaggaggcaagattcttccccctccacctccaccagggggcttctctctcccacctccacctccgccagggggctttactcttccaccgccgcctcccccgggtggaaaaattggtctacctcctcctccaccgcctggcggaatggctctcccgccgccccctccgccaggtggtgccaagggtgttcctggattgccgcctccacctccgccccccggcggaagagttggcgtgcctccgccgccgccccccggtggtggtggtttcgctcttccaccacctccccctgttcctggagccaatggcctgatgattcccccgcctccaccccccagcgccgccttaggtacaggctggagacccgcatacatggttggagatgtttcgccgtctacaattcacatgccattcattcgacctaagaagaagctcaaggctcttcattgggacaaggtcgacactcctcaagttactgtttgggctactcacgcaccgacagctgaggcgaaggaagaaaaatataccgagcttgccaagaagggtgtactggacgaggttgagcgattgttcatggccaaagaaacgaagatatttggagccagcactggtgcgaagcagcgcacggccaagaaacagattatctcgaacgatctatccaagaacttccagattgctctgtccaagttctctcaatacccggccgaggaggtcactcgcatgatcatccactgtgacaaggagattctggataacagtgtcgtcatggacttcttgcaaagagacgaaatgtgcagtataccagagaacgtagccaaacttatggcaccatatagtatggattggacgggccctggcgccgctacttccgatcgcgaacaggatccctccgagatcactcgcgaggatcagatctatctctacactgcatttgagctcaatcactactggaaagcaagaaacagagcactcgcactgacccgcaccttcgagccagagtacgagcacatatccacaaggctaaaggaggttgcacgagtcagcgagtccttgcgggactctgtgtcattgatgaacgtgctcggtctgattctcgacattggaaacttcatgaacgatgccaacaagcaggcccagggtttcaagctgagctccctcgcccggctgggtatggtgaaagacgacaagaatgagactacctttgccgatctggtcgagcgtatcgtgcgcaaccagtacccagagtgggagggcttcctcgatgagatcaacggtgtcattggtctgcagaagatcaatgtcgatcagctccgcaccgacgccatcaagtacattagcaacattaagaacgtacaggccagcttggacgctggtaacctgagtgaccctaagaggttccacccacaggatcgcgtcagccaagtcgttcagcggtccatgaaggacgccagacgaaaggctgagcagctgcagctctaccttgatgagatggcgaaggcttatgacgatattatggtcttctacggtgaagacaacgcagatgagaatgctagacgagatttctttgctaagttgagctcgttcttgatcgagtggaagaaatccagagagaagaacacagctctagaagaatccagaaggcgcacagaggcatccctcgctcgcaagcgaatcaatgtcaacctcgccaacagcactcccaccgcagagacagtgcagtcgcctgcttcaagtggtgccatggactcattacttgagaagttgcgtgctgcagcacctcaagccaaggatcaacgagaccgccgccgtcgtgctcgtctaaaggagcggcataacgtccgcgtaacttcggggaccaagccaccacctgattcgggtgaggcggaagaaggcgaagacggagttgaaaagacaaccaatggcgataataatgacgagaccggtcttctgagccctccgagtaccgcgccggaagatggcaagcaggaagctcaagtatctgaaggcgaagacgttgccgatcgtgcggccagcatgcttctcggtctgagaagtaattccgatgcaggcggcggcgagcgccagcgacggagaagagagagcgcagatgaagagcgtcgtaaccgccgcatgagacgccgaaaccccacaggcgggagcaaagatagcgcggatggctctagtggccttgctacagttcaagagcctgcttctccttcgcagacagactcgatggccacagacgatcaacaaccccccggctcacctaacgagtctcaacctcccccttcaattgtcgtctcggagcaaggcgagtcatcacaggatccctcagttgccggttcctctcctcaaaaaccaactgatttgtcggattaagtcaatcaccgacagccgatttaatttaatgttttatcaattctcattgatgatgcattggattcaaacccaaatgttctccattgccatcaataccactacttactacttactacaaccgccctcgattgtataatacccattccctacttacacttctactctttgagctgccctccttgatttgacgagccgagcatggtgcgatgatacaatttctttgtttcttcttttctgtttcatcttaacagtatcccttcatgtgcaatcattttctcttttctttttgttatccactcccgcatacccaccgacaccctgtctccctctccttgtacataatccctttccccccgtcttcttcatccaacactacctgccatggaaatgtcgcgatgattggagggcgtaccatcgaattgcatgttgagctcgatgttcaatgtttcctgcattgtcgccttgttctttactccctacttccgagcgcatgtcgtggtcaagttttatatctgctgcgtatccttgactagagccgcattagatggactgctattgcttgtgattttcaggatcagaatttaaagactcgcagttagacaaaatctatgttctcgatctcttccaagctctcgattagcatgtatggctcgtgaaggcggtgatagaggcggtaagatagtgcccgatcctcagtcgcccttatcgcaatataaacatcggaccaacatttgaacatttgaacaccctcggcatctaccaatatttcattggtttaatcttgcgcatgcgagcatctcgccaagttctgcgttgggtctctcccttcagcttgccaacgagtcaaccatggcaaattatatcaaataaatcatgtatccgacgtcatggctttctctccgaatcgcgtggctgggctcccggacaagctcgagctttctcgtctactcgcccagctagattcatgctagatggagactctacaatatatgcgctctctactgcaactggacgagcagccattgcagtcgtgcgtgtatcgggtccggcatgtgcctcggtatgtattcctcgaagaactactaaagcaccagactaacaatgccattcagatatacaagagtctctgcccaaaccacccgcttccaaaaccgcgctatgcagccctccgcaccctctatgacccaacccaacccccaaccgcaaacacaatcctcgatgccggcgccttagtcctctacttcccctccccacgaaccgcaacaggcgaagacatcctcgaactacacatccacggcggccccgcaataacaaaagccgtcctttcagcaatcgcacagacaaacaccccagagcaaacagtgcgctacgccgaaccaggcgaattcacccgccgcgccttcatgaacgaccgtctcagcctgcctcagattgaagcactcggcgacactttgtccgccgataccgagcagcagcgacgactagctgtgcgtggctccagcgacgcattgctgaatcgatacgagcggtggcggcagggtctgctgtatgcgcgcggcgagctggaggcgctgattgatttctctgaggatcagcatttcgatgagtccaccgaggagcttgtttcttctgttgcggcccaagtgcgcacgttgagcgtgcagatcggtttccatattgctaatgcgtcgcggggcgagttgcttaggaatgggattcgggttgcgctattgggtgcgccgaatgctggcaagagttccttgcttaaccgggttgttgggaaggaggctgctattgttagtactgagcaagggactacgagggatattgtcgatattggggttgatcttggaggatggtattgtaagcttggggatatggcggggatccgggctgagggtagctctggtgatggtgagggggttgttattggagccgttgagaaagagggcattcgccgggctagggagagggcgttggagtctgatgttgttattgtggttctttcgctggaagacactgccactggcgtccagctattcgttgagccggaggttctgggtgctgttaatgactgcgtggaagcaggcaagtgcctcgttgtggctgtcaacaaatgcgacaagctacacactgccatggaaagtggtgtgccgcagtcattgtcagatacgatccacgacatcttcccttcggtcccggtagaccgtgtatttaccatttcctgcgaggaagcccgtcagggagcatcgtctctcaataccactacagacccgggtaatctacaggtctttctacgtggactaattgcgacgtttgagcagattgcctcgcctcttggcgtgggcggagatggaggtcaatatgatatctcgtattgggaagattctctaggtgtcacgcatcgccaaagctctaatcttcaaatatgtctcgatcatctggacgacttcctatctcaagcatcttctgctgaatgtcatgatggttcctcgcgcgagagagaactcggtcctcttgattcccatgttgaatctgaagtcgatatcgtcactgctgcggaacatctgcgctttgcggctgatatgctggctaagatcacaggaaaaggcgagagtggagatgtcgaggatgtgttgggggttgtctttgagaagtaagtactggagggtctttgtcttggtttgctggtctggatggcgagctgactgtcgtagattctgtgtcggcaaatgaacattccgattcaagtatggctccgacgaggttgacttgcatcgccgtcttatgatagcttgcttgttcggcaagagtcgtgacatcaaccggttgctggttgcaattgacatgattgaaatggttgctgggagtgcattgtccatcatgcacattctggacggcctaattttggccaggcaaaagcttggggcaagatctgctggcgggggcattgtatcctcctcggcccatggcgggaaacatcatgacgaattatttaggcagagataactgctggatcgcttcaaagtggtagacgggaggtgacgggtggtgatgtgttgatgaagttgcaagaaccgatgcaattgtgtatgaatagcagctcgatagactaataatgtatgcaatggtaacctaagaactaccaccaccgatcagcaacgcgatacttataagaaactaaagggaatcccaaaattgtctgccttggttgccggggtctcattcatcatcccaggcacccagaaacggactcttcgggtttatttccgaaaattagccaaaacactcctaatgtccttgtcaaagacagaattctgtcaaacatgaatgatctttctgagtcaggaccggatacagtctccgcaaagtactgaaaatacctggcgtgtctcagttaggccagatgtatccgatgccgaaagacaatacagcacgccctaaattattatattgagacttgggagctattcttgtcatcctagatgctacggtatcatgaagaattccaatgctgaggcaagcttcagctgtagccctgtataaggccgagtttgaggttggaacatgcttcctgggtgtcgatcattgtggttactcgcatctaagaaatttctatatttgtttctttctatttctatttccattggctatttctctttattcgctattcgactaagatattgtcggagtttcagtgtttcaattctaaaactcctgtcagatctaagaatagcgggatatctgcaaggaatgggattccttctagaaggactatcgtccaatcaagaatagaaagtaccaagagtaaaatagaaatgccccgagaataaaataagaaacccacgttgtgctgcagaacaaacatcatctctttaccctgtcatcggggctgacaaggaagtaccttgcagcctcggacaacaatgtaactggactatttagaccccaattttggcttaagagaataaaaatatcctttatactgtctataataagctaatagtctggtaggggtggtgtagagtataggccagataaccaccgatgtctgttgtgcagaatattctatgaatagcttcatcatccctgtctgtccatatggctttttcatatagggtgattagttttgtctggggatgcttacttcttgctaggagtttgttcaacccttggtttttgtttgtttctttcgcctttctttgtgtcattctagggctttttcatacatatagggcactttgacagttgatcattctacagagccttaccttggagagtgttctgtcaatgacaatactgataaacaaacaatacgaaatggaagaattcaaacattaagtatgttatttggcgacgtaagctattccacatattgcacgccattcccttagtgaaccagaaacaaaccaccacgcctcaccacactgtagcctacttcttctccctgaacaaacgaaagctctgatatctcctctcccttctaaaccaagcagcccatcacaattgcaatgaggttgaagtattcatgacgaaggaaatcaaaagtggatgtagtccgagccaggacactcatagtattcaacgtaaaagtcacggagagctcctagacactcagagggattgagcaagtatgagcaagaagggctgtgttcggcatggtgatagaggtaagagacctgaggaaactgggcacggcattggaagcagaagaagggattttggtcggtgagtcggttgccataaaacccatattcaggagactcgaaggcgagagtgcggatgcggtcctgcttcacgcaacggccttcttcgaggtggaagaggaggcctgagaacccgatccagtttgttgggcaaaaccagcattcgtagattggaagacccagaggattgttacggtcttgttgtgctgtagggggatgatacatgatggatgtggttgtggatatgaagtagattgatagaggatagatgaaggatgaagaatgagggacgatgatggaagaagcaaaagcagtggaagagtgaaagaggaagaggtcgggttctgtttgttttatagtcagagtacttgctattttgggattcggtttgctgcatgtacatccctattttgtttcccttctctgtttattcttagtctcagataccctctctagattattgcatttgatattgatatggaacttctataccaaaagatatatttcacagtcattgggagttatggctcaattgaacaaagacaagccagtttgctatttacttgactatgtcaagaccaacaatgatattatgaagacaaaccctacttaattacagtgttctttaaagcttcccacctcgcaagcacaatatcagaactatccgatcacagcgccgcgataccgcaacgcaaagcgaccagccaaccacatcgatcctacaactgcagatagagccagtccactgacagcatagagatcccagttcctggctttaaaggtagacatacgcatatcagccgtctgcaggtgcatcgggcgcaattccttgccgtctttgaaccgtagctcattgtcgtacatgagctcctcgataagatcggcggcatgatacttacgacgactagcaacattagcaatacgctgtaggcgaagcacattccggctgtatgtctcgttttctgatttgagaatcttcatggctttggtgtagacctcatctgatgtaaagttgagtttactcaaagactcggcgacacctccggcgaccagccgagcggtgttggcgatctgatccgagaagatacccattgataacattggctttccatggtaaagaccctcgttagcactagaacctccaccatgggtgaagtagagcttggttgattcgttgtcgaggatagcacgttgaggtgcaaaaaaggggaagatccaattcggatgtttgttgtcaagtagatcccctagggtgatttccatttcatttttatcgcctgtgttgaattggaaggatgcgctagcaaggttttagccgtgaggagagagatttgattctttaatggtagggtttcttacctgcggtcaaggtctgctcgacatgtcttgcccatagcccagatcacaccatcgatcataccatcctcttggaggcgattcgcggccttcactatcttcgcagcatccttatggcgatataaagaactgatttatgcctggccaagaatggcccgcactgttggtctagtggcgggtatgtcggactcaagagaggaccaacaggagcagcagttggaggtagatcgcgggggatttccagcccgaagaaggagttgacaaatatgagatagtctggtttgctgggcttatgaggcggatagaagacgccattgtcgcttcgcatcttcttgctccattttcctgcgcgtacgatagctggtagatctggaaaaaagaagatctcgttcatgattcgtagccacatggaagtatcctcggatgtcatggtccctggaagctggaagcctggctggcctgggatgtacgggcagggcaactggaataaaggcatattgggacagatgatggcgattggtaccttatactcaaagtgaatatcgttggctgcctcgacaaagaaatccgcaactatcatgtccggtcgagtcgcagggtcatccatgatctctttgagacgatggtaggtttgaggccagaaggagtcgaacatgtatttggattccatagcttgtccgacacccttggagatatcccatgcctgcatacgccgatagtgaccatcgagttgctcgggggttggtccggggcctaactgatgaagcttgttgacaaagtcatactcaggtttcacccagctctcttgtccctcaagtgttgcaaattcaatttcgtggccacgctccgcgagcacccggccaatttccaaaacaggggctgtataggttcttatttagtggtctatctgttcatgtttcatgttccatcttaccggcatgtgtgaatcctccggtagtaaccaccagcaatatctttctagataaatgtatttgggactggctcattgtgagaaatatggagaaatcaattactttcactaaaaacttgacagaaaagagcgaagcacttatacctcaagccccgaaatggcccccaaactaacatcctcaggccatactacggacttcggagagtttcaaacaaatcccgccgagtatagacttgataattgaagattcactggagttaacaggcaagtccagagagctgaacgatttgaacattcatgctttaaaatgatatcccataatggttacgggctttgtacatgtcctaactagaatgacaagttgctcacaaaaacatcccacttttcgaatcctcaaactgacatagagagttcctccccttttgaggcacatggaaataagtaccggcagtcctaggccctttgctactagctaggcctgagatttgacactatacatgcatgatgcaagtatgtaacttcaaaggtggcgagacaaacattacaaaccagtcacctgatgatgacagcatgtgactctttcgccgatatcggtcatggtcttcatctttcatatctcaactacttacaacatagaggaagaagagacctacgaaaagagcaactgggtctaggaagagaagaagagtttatttcatacttacttcatacatgcacctttggaagacaaccatttcatactatacaaccttgtatatgtcgatcaaccccgccattctcacgttgatctctcaaatagattatatcatagacaattggaaagtgagatgggtttttgatatgcctctactacgtacctcgtcagtatcagccatataagccatccaaagaaataattcctcaaccaagatcgtgactcaatggcgcataccgaattgactcataccccgccattgccaggattgacctataaaacattcaattgaacgtgtaatgtagattcggtgaatatatcagactgcacgttggaattccagtaaatcctgttgttggaacatataaatcgctatatcttctcttactgtccttgcaaggttgatccactacggtccacaccttttgaggtttttctctcccgcttcttttctttctcttttacatcagtccacctcaattaatctcactatgccttcccgacaagaagtctcctactttggagctggtccagctcccctcccgacatcagtcgttgaagccggcgcaaaggcattcgtcaacttcaacgacgtcggactcggactcggcgagatctcgcaccgctcccccaccgccaacaagatcctcaacgatgccaaagccaacctctccgctctcctcgatatccccgataactatgagatcctgttcatgcaggccggaggcagtggcgagttcagcgctgtcgtgcaaaacctggtccccgtctggattgagcgccgccgccgcagggctgaagccgacgtgaagaaggcacagcccggtgcggagcaggctcaggttgacgaattggtcttccagagacttcagaaggaggtcgatgaggaactcaagctggattacctcgtgactgggtcttggtcgctcaaggcttcccaggaagcgagtagactgatcggctcgaaatatgtgaatgttgctcttgatgctcgcaaggctaacggagggaagttcggaaaaatccccgctgaggatacctggtcattgactcctaccaagaaggagggcggcaagggctctgcgtttgtctacttctgcgacaacgagaccgtcgatggtgtcgagttccagcagttccccaagtcattggaggctcagggtcaggatgctgaagatgagcgtctcgtggtcgccgatatgagctccaacttcatcagccggaaggttgatgtcagcaaatacgcggtcattttcgtacgttgacttcaatctttccgcgtcatgagtgtagtacactaacaatatatacagggcggcgcacaaaaaaacattggtgtcaccggtatcaccattgccatcgttcgcaaggatctcctccctccccagaccgcgactccttcccctgctctcctccaccggttgaacattggcggtcttcccggcccaatagttctcgactacgcaatcaccgcaaagaacaattccctctacaacaccctccccatcttcaacctctggattgccggccaggtcatggccgacctgatggccgagttcagcgctcaaaaagttagcgggcaagaggaagtagccaacaagaaggcagagcttatctacggtgctttggacaagttcccgcaagtgtaccaggttgttcctgacgctagcgtccgcagccgcatgaacatctgcttccgtgtcagcggcggtgatgatgcaaaggagaaggagttcatcgctggcgctgaaaagcgtcttctccagggcctcaagggccaccgtagtgtaggcggtatgcgcgccagcaactacaatgctgtcccattggagaacgtgcagaagctagtaaagtacctcgaggactttgctacagcacagtagatccgtttggatataatatcggtgtttgagcgaatccaacctagggcttttggccaggaacgtgtgatgggtaacgaaaaaggacgccagaatgtgtccaggacagttgcgactgtttattcaacataactcccagtatatccatgctatatatatgctttaatgacaaaaatgtttcagatgttggtacaaaagcccaagagaaagtgctcagagcttccacacagcccattctttgagatcaagctccttgatgattccttttagggggccctggagctcctgaccttgcgcccacagcttaggcccagccatgtagctgatgaacccctcaggaccagaaaccaaaatcaaattgctcctgcgagagttgccttttgacgctggtgcaatagcacctcggatatcttccttcccaatgaacgtgttctcctcgtccagataataatccacaataacctgcccgggatactgggccttgagtgcctctagctctcgcacaataatagaagtttcttctgttcgtacaacatccacaggcttttccgaagtattatcccgactcttcgagccaaaccacccagagaaccagccccggcgtgactgcggcttcagcgagtcactatgaccaccagcacagtcatcctttatccgattcgcccacaagatatggatcgtcggtcgatgttcagtatttttgcgattcaaaagagaatacgcagcctgcagagctggcgcaatccccgtcccaccagcaataaagacaatatcactcgtttccttcgggatcgcgcattcgatcttgggtccacgaatctcgacgtcagcaccaacagcaatattatgcaggtagcgcgagacctctccgaagggatcctttcgaatgaagaagcgcaggcagccctcgttctcgtcgtcgacacttagcgatgtcgctgccgtcgtgggcagcggcgtgtaatcccgtccgatttgtaattgtggttgcttgaacatcacactccagactcccgtctgccatgcttcctcgtagacatcgtagttgctgtcgctgggtatgcgtggccgcagcgtgaaaaggctgctggttgccgacacgggctcgcgggatacaatgctgtatttggtgaatgtttcggggttcaaggtggcggatgatgtattttgggattggatataggcgcctgcacctgctgctgttgcgcctacgaaggcgatgcttagccagcggcgcgagttggaacggggggacttcggtgacgtcggggttgctgaggttgaagcatagcgtacaggccgagctacagctctgagaccctggctgcttctacagcataaagaagataggttgttcatgtggaagtgcaattgaagaaaaaagaaatcgcgggggcccggaaatgagggtcgaggccaagggagagccgggcgatcgacaagaaaatacacccccttggcggtttcttcttcttctttacttcaactcactttggagatttctcctctaccgacttgacattctcgttcttgacattctcttcaggcaatggagacttctcttggctactcctgacgacatacctttccgctaccctctccctctcctcgacgatttataccacacggacacaaagagaacatgtcgaatacatatcaagggaacaggaatggtagcctcgctgcgcctcgagactcactagaactcgcctccctcgcatcctcatctcccggctccgtaggcgggtcctcacgctcctcttcccccgacggtgtctcttcatcccgcaagctctcccttgaggacgaagatcctctcgcagaatcgcatcaagatgccgagctagggcgccgtcacagagctcagagctcgttctccatatcctcagcttttgatttcgggcgcaatctattcccgctgtcgcaaacacagggtggttacgcgcccctaggtactccgtccgcggacagaccaggcttcacagacggatcgctggagcggaataaaaccttgacatacctgaacggtctatcgctcatcgttgggctgattattggatctggtatcttctcgtcaccgagtcaggtcaatgccaacgcggggtcgccgggcgcctcgctcatcgtttgggctgtggctggtctgctggcctggacgggcgctgctagctatgcagagctgggaggagcaattccactgaacggaggctcgcagatctatctgtccaagatctttggagagctgacgggtttccttttcgcatggtgtgccgtgttagtattgaaacctggctctgcggcgattatctctctcatctttggcgaatacgttgtccgtgcgtttgtgggcgctgatgttggcgacgtaaatccttggatcaacaagggtgttgcatttggagggcttgtcgcagtgactctgctcaattgcatctccaccaagttcgctacccgcattggtgatttctttatgttcttcaagttcgttgctctgctaggtgtcacagtcatcgggattatagtcgctgtaactggcttctcggctggaggcaacgcaaatgaagaatggaagacgacaggatggttcgagggaaccaccaccgagatatctgattttgcagtggccctgtatgcaggtctttgggcatttgacggctgggacaatgtaagttgacactcaagtattttgaatgcttccactcacatcttacagaccaactacgtgacgggcgaattcaagaacccaaaccgcgatctgccccgagtcatccacacggcgatgccactggtcatcatctcctatctgctcgccaatgtctcctatttccttgttcttcctcactccaccattgaggcgagcaacaccatcgccgtccaattcggcgcaaaggtattcggcgcccccggagccttgattttagctctcgtcgtctcagccagctgcttcggagctctaaacgcaaccaccttcacaagtggccgactagtctacgcagccggcaaggaagggtatctcccctcaatattcggccggatcggtctccacgcctcctcgcaaggccctccagcaagcagccgactacgccgccgctcctgggccagcagggccctctcccgtttcttcggcgataactccagactcggcttcacgccaatatatgccatggcttttaacggcgtcctaacaactatctacatcgtcgtcggcgagttcggcaccctcgtcactttctatggtgtagccggatacaccttctacttcctcaccgttctcggcctgatcgtcctccgtatccgtgaacccctgttggaacgtccctaccgcacctggatcaccacacccattatattttgctgcgtgagccttttcctcctcagccgagctgtcatctccgagcccttgcaaacgctcatcgtcgtcgcgttcatcatcaccggcgtgcccgtctactactggcgtatttataagcgagatggtcggatcgatcttcccagctggaaattctggaagcgccgataaattcggggaaactctccgcctgctctgatcctgttcgcttgtatgattgtgatacccatgcgtatatagctagggtgtatggtgcgaagtgaaagctgtctctggtgtttgtgcgtgtatttgcgcttccaatggaagcctttttggcgacgatgtgatgaccatggctttaggcgggtgcattctgattgcttcatctttttgctcgttgcatgatgccccacgccgcgtctacttctaccctgttttattagagatctagcgcgctgcatactacatgcggtgcatactgtatataatcttcataatatttgcatattgtaatctctcatacaccaagcccatcccatatagaagctcgcacgagaactgcaggctgatccccgtccaccccagcatcagactctgcgaagaacagtagtccgaagcaattagcttctgggtggtagattcgtgtagatatgaccgttctgtcattgacaaaaacttctaacacacttgagtcgaagaaagcgtgcactcgaagagtttcttcaacctcgtcacctcgctcattcaggcaagtaaatagcgtgtgcggagcagtttcatagccatggtttacttcagtgtcgtcaatcaaaggtcgatggatttcgaaggtctcacttcgtgggtcccaggaaagggtcgtgcaatcttgaccgtctagatgaacgagtatcagttcagtatatataagatgaatccgaagaatcagaaaaatgtcttaccatgagtgtgtagaatcctgatacccacacgtgcacaggatctactaaccgagaattcggcgtcgatttcccatttagatgtccccaacagcatcgcactttgtgaaggtgatgtagacagggcaacgtcagcgaggtggctctcccgtgcactctgtctgagccgcgcaagtcggctatctgggttgatcttcatggtatggatcgtgaaagtaccggtaccaggtgcatcggggactgcttcaattgaggtaatcgaacttaactccgagattcgtgccttcttgacatttctcgttgtcatcaatcccactacacgaggaagtgaaagcaggccactgaatccttggcgatgacgcagagtattggacaggtcctcttccgtgatccagccatagacgatacgttgcgaggtttgagggtcgtagaaggagttcgccgcatagtagcagccatgatcgaagataccagagaaagcatatgaggctagagcaccgtctgtggaggtagattgcttttctccgttggatgtgacagatatccagaactggcctcggggttctcgtctccgacgtgcttcttgggccgcgtcttggtttgaactctcgaatggcacacagccctcggctcccattatgatgaagtcccgagacgtggtatcattggtcaaggtcatcagattagcaacttcccagttcagaccatagtcgcctgaccagcgagatggatgtagattgaggccgacgtcgatcaatgggccaatgaactcccacttgctgagatctgttgcttggacagtgtagacaaatactgttggagttttcttggaaatccctcctgacacaaagccatatagtgttgacggtgtgtgtttggaaagaggtccttcggcccaagttgtgataaaagaatctctccagcccgtcacattaagatgtggaggcgggccagtgaggaacgggttgcaggtctggcgctcccaggtcttgcctccgtcttgcgagacagctaaactgagagactcactaccgagtgtatatgggagcgtataacggattgggagatggctcacggaggtgtatatggctgtgagagctcccggctgtccaaaggcatcggttgcctgtagacatcccgtaaagacaccgaggcggtcatatttagtagcgggcgtcaagatgggatcggtggatatcgcccatgacaccaggtctggagatatagcatggccccaggagatattgccccaatcattcccgtgcgggttccattggaagcataaatggtataagcttgtttttgggtcgtatcccaatccatttgggtcattcatccatcctgctggtgccatgacatggaatgatggtctccattgtgaaggattacgaagcgatttctcttcatgagataggccattaacttcatgggttaatccgtgcatttcgccaataatccactcatctagccgggaatatgagttttacgaggttgctcggattcgcacaccttaaaacataggaaatcttgaacgagtccggtcttcaagacgattcgggggttaatcgggaataggttcggtgtaaggaggattgtcggcgaaatgcaatatatagatcaatataaatcaatgcaaatcaaaacaagtctatacaaagcatcagagtatataatgcgatagtcagacgggtttctgatctgaatatatgcaatgaagatgcattccctcgagtcgcaatgggagatctcggagaaacttcccctaataaatccggggagtttaggattttggggaatccggggaactccctttcttcaacatacaacttgagccttatggaagtgtgtcttccaaggattggctcacacaatctgcatgtctttcaagtgtggctcgactgagactcaagtcgactactcgaactcgggcgcgcggaagtcgcacgcggtcaatgtccagttaattttcgcctgtacagtgttcggtgccgcatcattcttgtacggattcgatgacaagattatatccccggttgctgcattgccggattttgtaagtgctcgtttttttcataacacaaaatgttccaagctgattcggagcaggtcgagaaattccaaggacctaacccagtcactgggcagtatgtcctcacggctcgcaatcaaaatctagttttctcccttccattggtggcgtccgtgatcggaggtctgcttgcttcgccactgaatttccaccttggtcgcaaatggcctttgattattgcgtatttcatatctatcggtggcggattgctgcaagtctttgcgccaaatttggggtcctttgtgggaggtcgttctatcaattcggttgctttgggtatcataaatgcaactgcccctttgtatatctccgaggtattgatccctaccgcttgttcaatgttcaatctcgctcattcttacaattaggtggttcccgcctctatacgtggaagatgcgtcagttcaatgaatattttgaatctaaccgctggcgtggtaggtactgtggtggtcttcagaactgaaaagattgaagggaacctatcgtaccagattccaatggctgtacaatgtgctctgcctgtgcttcttctgttcctaacggtgccccttccagaaagcccgcaatggctggtcgggaagggaaatatagaaaacgctcgacgcaacctgcggaaactgcgtgggtccagtgacgacgaggttgaagatgaactccgtctcatgatgctgtctgaagaaaatgagcgcgagatacacgcccagaccaagttctggcacatattccaacgagagcacctcaagcgtaccctcactgcgggctcatttttctctcttaaccaaatatcaggcgtcattctttcaacaacgtatacaaccgtcttcctcacagtactaggggttgcagacgtcttcgccctgacaatcatctcatcctgctgcacattagccggcactatggccgcacccttcgtcatcgaccgtgccggtcgacgtcccacggcattcgtcggaatggggattctgttcgtaatcgacgccgtggctggtggcttagcttttgacaatagcaacaagaaagccactatggccattgccgctttgtccttcgtattcaacttcttctgggcctcttccttcttctcgctgtcaatcctaatgccctccgagatggcaactcccaaactccgccaccacaccatggcctacacgatcgcctgtgcacaaacaaccgccgttatcaccaccctcgttgttccgcagctgacttcggcggatgcagctaaccttggtgcgaagacttatctcgtcttcgctgcctgcatggctgttatcattgtctttttctactttttcatgccggagacgcgtggccggacttttgctgagattgatgagatgtacgcggctaagatccctatgtggaagtggaggtcgtatgagacttcattggagttgagggcccgtgaaaaggatttgtgacagagcctcgattggtttatttttctaattgaagtctgtaaaatatactcgagtaaatactctatgcttttcgcgttgtaccgatcatggatatataaacttgggtatagttgaactcgctatattggtacactgtaaaatctagtgaaacccgatttttccatggcatgagccaaggtataaaaaaagtaaattgtacaaatcgaagacccgttcgtgcaaggaattggaaaatgacgcaggccaagtagcagaaaaaacctccctaagagcctcatcattgcgcccactctggagctttgggttccatgatctgtagcgagcgtaggtgagctctatacttctccaggtaaggatggtttccaccgcggaagctggtcataagtaacaaaaagtcttctgcgagactctgggctgtggaagttgtagttgtcggtattatttcggggaaattgacgggcatgtttaggccaatcccgtaagagggatttgtgttgcataggatgtttgtggcgcagattgcgatatcgtacagcttttcggtctagatgttgagttgttagtaagggataaaggtcagagattacagcaagttacacaccaaaccgataccatgggcttccatggagctcagccgtaatgactggcacagccggagagtggattcagcaacggagacggcatatccgaagcttagctcgggttgttccgaatgggcactcagaaggccgtgggttgaggagaggagccagacacggttctggagccatttctgggtgataaaaacgtccgctgcttgggtctctcgtaggcccatggcaaatgtgacatttctgctttcgcggccttccttggctcgctcgaaccagtcatagccgcgatatcgttcggcttggttgactcgattgagattttggtggatggagagtgccttgactgcggtcagtctctggcagtacccgttgctaccatcacatcggcggttccagcagtcgatgacatcttcgtcgatggcatcgaatagttccatcattcgtgcgagacccatcattccctcggcatccttctcgttgtggaccacaattccagagacgacgctatgcgtggcgctgtggatgaagtcatgcactgaccgcatagtgaatccgggcttcccccagaaggttattggatgtcgccgttgcaaagcataggctctgaagtttatggtcagcgagttgattttgaacagggctagtcactttgattacctttctgtaatagagaggacgaggtacgttcgcagccgctggcctttctcttccccagacaaatcctgatatgactcgggatcattcaatcccagcgtggccgcaagatctagtgcctcccgtatccggagccatgctgcgttgtgctggttacttccaaacaaacagccaaagaggaagaaactcgttagaacagcttcaatagttggattctcgccaaaatctgaacagcttcgcattttggtcgctgcgttcatcatggctcgtgcttgcagagctcgagatgaggacgtcggccgctcgttgatctcaattggctgtgtgagcgagaatgcacataacgacaagagcatggccccgaactgagagttcttgcgatgctcttgtgtgatcattgaggtgtacagggatgaccggttgagcacgggtatggtcggatgtagccgatcaaagtagacatcgatccaagggattatatttgcttcattgattgtggatggccagattgcgtcggtctcctgggtatctgagcgcatagacctcacggttggtgagaatgccatatttggaccttcctggggtatccctatggccgcagccgcagcatcggggacaggttgaataatagacgggagagatggccggagatatacattacttcctggtaaatcgaagatagggacttgcgcatccagattatccggaagccagtactcgacgtcatttcgatcgttccagctcaggccgctgttgtgagaatctatagatggggtttcctcaccccaggctgccatcggaggaggtatacctgcaggtgccaatccggcgccctctaagggcatcgtggctggaccatgagtgggggccccccaaggtgctctaggtaaagcttgaccagactccaccgatgaggatggagcttgaaattggaagccattcttagactcttgagtaggaatgacagtttgctgctgtcgaatttgcgacacgcgactttgtccctgtcagtgagattattcatagtcacgggccattactcactgcccggttggtccgcgcttcttctgtggttgaaggaatgtacaatcgaagcccatagactcacaggccttgcagggctgtgacaagctacactggggtggtcagttagtacattgactgttcatttaatatatagggggcggtggatatcctaccttgatcttgcgaaatttgcattggtcacatgccctcttggcaataggcgatttatgagatcgaatggggccagtggcagagcctggcgatctaatttccataatataaagataaagctgaatacgaagtagctgcagagctataggctcaggtagagagagattgtcggacataaaatctagtgaggtcgaagggtctgacccacattggcccccttcccctctcctgtttcctctcttttcgctcctcgaacgatcttcacgtcaagaagatcatgaaaaaacccgccaaattaactggggaacggcaagtcccgctgagattggactgaagaaaaaaaccaatcaattcatatatggcatttgaccagaatgtgccacgtctccacttgataagagtggccctcggagtgtagtccgagcagactatattaagctagtcttgacctccgtgaaaatggcaaatgatagcaaaaatgggcagttcacagtcgtgggaagagattgtcgctcacaaaaggctcatcagagaccaacttatcgcaccgtacttagttgatgtagctcaacgtctgccgcaagtacagaaccccgaggagcgtactcggctagaagatcccttgattcagaagataacagatattgacaatgttgccgccctactggaatgcctggggaagggggagttccaagccgaacaggtgatcaaggcatatatccaacggtatgtctgctatcatgtctgctatcggcgttggaattgaccatatactaatatcctcggtagggttgtggttgcacatcaattggtatgtgtctttcatcctcgtccctatttccatcgaccaactcactgatgtaatcttgcatgaatagacaaacagcctgaccgagattcttttcgaagatgccttaggacaggcaaagcagctagacgtcgagtttgcagaaaccggaaagctcaagggtcccctgcatggaatcccgatcacgctgaaagaccaattcaatgtcaaaggcgttgacacgaccttgggatatgtgggcaggtgcttcgcccctgcccaggaagacgcagtgctcgtgcagatcttgaagaacatgggcgctatcgtcatcgcgaagacaaaccttccacagagtatcatggttcgtctgagcatcatcactagctgtatccgattcggagattgacttcatttccagtgggccgaaaccgataatcctctctggggactcacaaccaatcctcgcaatccaatctttacacccggcggctcaagtggcggcgaagccgctttgttgacattgcatggatcgctgttcggattcggaactgatatcggcggaagtataagaatgccacaggctatagtgggattgtatggcttcaaaccaagcgtaaataccaaccgccaggaacaaactgcctatccaacgatatgtgctgataaacttccgaacagagtgccagactcccctatgagggtgtacccgtctccactgaaggtcaagaacatgtcccatcttccatcggcccgatggcccggaatctctcgtctatctgctacatgagccgtctgctagcgaatagtcagccctgggacctcgattcgcgatgcgctcctctcccctggaacgagactgcattccaagaaccccaagaccgacctttggtcatcggcttgattctggatgatggcatagtaaaggtccacccgcctattttgcgcgccctacaagaactctcgacggtgcttaaagcaaatggccacgaggttgtggtctgggatacatctgaccatgcggggtgcattgagatcatggatctcttctacacggtcgacgggggtgaggatattcgtcaggatgtagctgtcgccggcgagccgtttattcctcacgttgaagcactggttaaccgaggcaaggctatctcagtctatgattattggcagttgaacaagcggaaagctgcagtgcaaaagaaatatctggataagtggaatgccgtgcggtccccttcaggtcgtgctgttgacgttctgctaagccctactttgtcgcatacgactgtgcctcatcggaaattccgttgggttggttatactaagatttggaatctgctggattatccggctttgacattcccggtggatagggtgagggctgatctggatgtgttgccctcggagccttatgtcccaagaaacagtgtcgacgagtggaattggaatctgttcgatctgaaacaggcggatggatatccggtgaatctgcagatcatcgggaagaaactccaagaagagaaggtattgggggctgctacagttattgagaagctctggaaaagtcatgtcgacaaatccaattgagctatctaggatttataggcagaatataaagttgggtcaactcgcagactgaatagcgtacatcgccgtggattgcactgatatttggaataaatggtagacgcaactcattatgcagcttgatgggatatctgcctccagagtcacttaaatgacaaacgccgtgggaatatgcaacaaggcaagaactcttgagtctcaagccttgggaggctcgaacaaatctggtttcatgttaatcttgcaaagcttcgccacacagccactcaattgaagtagtgactgcacaccatccagaatacgcatatgcgtgaatccaatctcccgaatgaactccaatttggaatgctcagacaatgtggggatggtcttggtgactcgaaacatggtacttatgatgtcgtgagaggagtaacccagggtcctttagatagatcggttagaaaccagcaccccaaaacaaacaaatttacaacataccatagctcgttcagcccctccagtgccacatccaccttgccttcccaacaagccttgatcatggcctgaactttgatcgggtgcgggctgtcgactactcggaaaacattgtctccgctgacgaaaccgaaaccggaccaagtactctgcaggttgttgatggcctgacgcatgtcgccctctgcactgaaaacaagtgcagcgattccatcctcggagtgctggacattctccgcctcgcaaatctgcatcaaccgtttgaccacctgagcatctgtcagtcgggcataacggagaatggcgcaacgggattgaatgggttcgatgatcttgttcgactggttacaggcaaaggcaaatcgtgtggtggaggaatagatttccatagttcgtcgtagggcttgttgagcaccggcggtcatgctgcggggagacgtgagtccagtgaccagaaggaaactctgacgagaacaaacctatcagcttcatcaaggatgaccaatttatggcgtccttgtggcagggtaaccttcttttgggcaaaacctttgatccgatttcgcaccacatcgatacctagaccacagcatcaatatcgaccaagtcatgagagcgattatgccacaactaacctctctcatcacttgcattcagctccagaactgcctccttgtatgcatctcccagcatttgccgcgccagacataatactgaagtggtctttccaatacccggcatgccagagatgataacgtgtggcatattaccatctttggcaatgatctttaaccgttccactgtttcagtgttgccgacaatatcatcgaggaaggttgggcggtatttctcgaccctattgacaagccaaagattagctctacctgatattgtcaagaaaggaaagcctaccagggaagctcatagtccacaggggcaccggcagtatttgccttagcagcattgcgagaagcagaggaagattcagcttgaaccattgtgagtgatttggtgattccaagtaaagaagagcagtgaaggaaagacgcgaaagaaacgcgtgggaaatgcgataacggcttatcagctggcctgtgcactttgcagatgtgatggcattgatgtatggtgcattgaagctgttattttgagattttatattacagaatctgtaaaagactgagtacggagtagtcaatcgttcgtaggttgactgctgcatacgtagtttagttcaatgctatcgttttcgtgacctgccccccccccccccccccccccccctctttttttttttcctccccccccccccccccccaaacttcattctgcgccattcttcctctcttcgccccaacaacaattattcttaatacctagaagtcggccaatgactccattccttctattttatacactctaataggcacagctcagattaacctactcttcaaaccatccattttcctctctgcgacgctcacagccgctgcatactcagaactccggccaaacccaacggagaagcacaaaccgtggtgtatacagtcatgcaaacatctggtatgatgaatcagacctctgtgcgccgtaacctctttcatgggaacctcagccgccgacctgcttctgtaggaccacctaatggcacagttcctcaaacccacggcggcctttccaatcgtccctcgcaccgactgaagcctacatcctcggactcggggccacatactcgaccattcaaaaatgcggaaaataaagatattgtggttcgggacaagaatggcagctacaagcttgagattccaacattgccgcaggttctggttggagaggacggcgaggagctagctgaacttgcaccagagggtggaagattcaattctttggaactcaatgggcgtgacaaagatagtatgcttttctacacgctgttttcctctgaagcatagtctgctaatattgacacagagtttgaggcagctctcgtggagatgatggttcggcaccggaccagacaatcaaacggtgaacccgatggtaagttacagtcagattgagtccgacagtcctatatgtgatcatatactgatacgaaacagagattctgagtatggtgcaggaaagcctacgcaaaaaggtagcatcactggatgaagacaattggatgtttgagccggagaaggacttggtttctaactagagggctgcgcttgctgcatgcatcctgatctcattacactatcagtcggatatgtttcccgtaaaggcctgcttcaaaagacccacgcacatctggtctctcttaatcaagctccatgctcgatggcggtgcctcaaccttcttcacagctctggattgcgatgctcctctgccacctgtcttgttctgacctcctccgaacaacataccgctcatcatgtccatcaatgggtttccttgccggggaatcttgatggcgaagtactgctcgccaatctgagccagagcatcgtcccagataccaacttctcgaatttgtgctgcatagtgtgcagtgagctgtcggaagagatcggcacttccgcgctggatggccaaaagcaacatggtgatgaagtttaccaaaggaagggcagggaacacccgggcgtcggagctggcactgctgacttcctgcacaccgagctgaggattagccgctgaaagccgcgaagtgaaaataagcaaggctttattcgcgctgcggagatttccggtgaggaggtatgggaaaactgcgcgtgacgcatagatcgctgcggtgtgtggctcatcgttggtgtaccattcatattcgagctttgcgagagtctcggctgattcggaggttcctagaatgagatgtttctcggcatcgtatggctcgttatctgaggcattagattagtatgcaccaaacattgcgctccgacatcacttaccttcggcgtatactgaaccaacagcatgatgtaaatcggcatctcctcgttccagtggtccgaactttgcactccatccaattatttcttggatgaacctctttcgtgtaggttcatctgacgggaattcgcgtagcaactcgatcaggcgctctgaagaacaaagatatacaagttagcaatgttaggcctgtaatagctactggggtaacctgaagcaccaagctgcagtaatcaaccccagtagtaaaaagatacttgatagactcactcttccgagcccgaccctctgcatcatcattaccgcctgagatctcccattcggctttgttgtatacttcaagcaccaacatgatggccaagtccccaccactggccgaggcaccctgccgagaaccagctttcaatagctccttcgcgccaccagccaggatctccgctgcagcatcgtagttggactgcttgatataccgggcagcaataacacgtagttgttggtgagcttcgtagtaggcgccatcagcaatcctacagacaacgacataagtcagaaccagatcttttgaagtccaaggtgattatggattctcacttttctcgctggcgggcgatgaccttatcaatccgggatgacatggtcgactagaaggaggcgccgagggattatatcaaagaaaagtagaatcgaggaccctatcaagcagagtgcgcaatgcaagaacgttcgcgaggagttggttgagatttggtggggacacggcagttcgcccagggccctggagaacatgacatctccgtcatctcctcagaaataccttatggttgctttgtagctgaaactgcttttgtttttacgtggaatctgctatttctactatttggactctgttcgttttattgaccccttgtttccggcgatattacgatgataccacgccattacggacatccctaacgactatacagctacctagctagtcgcgacaatccatatcaaggaccaagcaatcgctcttcttgattcagccatgtccatcacccaatagtgcgccaaattcatcatgaaccggtccacattcaatatccagcccctgcaccgcttccacagcgcaaatacctctatccggagaccgagggtaagccaaagacctagtgctatgtcaaacaaatgaaaatgaatcgctcacctgctgctaggaaatcgcttgcttctcttatgatgaaaatcgtcgtttttcgctgggcgattcgtccatggcctactactacacgccggctctccctgcagacctgaatataggctatgagacattccagaagctcaatgatgtcccggatgagcacttagatgctttacttgatacccttgttgctcatgagaaagaaacagagaagaagtgcgatgtagacatcgtcacatggagaggaatgatgaccaaggtgtgttgaattgaagtctatcgcggactatcatctggtttggaaccaaattcttacctctatttgcagattctcaccgctccctttgataatatgaatgggtttgtaaccatgatatattccaaacatagcgtgctgtctctctaaccccaggctatctctagcttcgagatgaatgcaacttgtttccaggtacgatatcagtctcaacaagattttccagattccatgatctaacatctatcaaagggtaccatgtgtgtatacctagctagcaagttcacaatataaggtgttgacttgttctagattcattgaggaaaacaacgaatacaaaaaccaacagaaagagatccaacgcaagcgaggatcgccacctggaatggcaccacaggaactcatgatgtattggggtgtgtcaaacaacccatggaaatgtgtatagactaacaaccctaggctataaattcgaaaagctggctgtacttccgaagacgtgggatgaatcaacccgtgaagagatcgaaggccgccagaacgaagtcgtcaacaatgcagcacagtattgctcggttgtccgcactgggatcggtaacgtgcgtatgattcttggtggagaggttgatgccagtatgtttaccttgattctcgtggctatacctaaatctaacttatgttctagtctgggacagcaagccatcgcgaaaagaaagccccatcaactgggttgagctgaagacatcagctcagatctgcaatgaacgtgatatgatcaagtatgagcggaaattgctcaagttttgggcacagtcattcctgctcggtgtgcctaagattattgtgggattccgtgatgagaatggtatttgccatagcttggaggagctagatacagctagcatacccgggaaagtgttgagcgtcggccggcgttcttgggatggaaacgtctgcatcaattttactggtgcattcttggagtgtgagtgttctttttcgtgaagtcatagcagcactgacacacctcccagggctgaagcagactatcaaccaggaagggacgtggagaattcggaagaaggaaaaatctccggtcatcgaggtctatcaggttgaggagcaaggacatggcgatattatctcacctgctttcaaggcctggcggtcgaccacgaccaatgcgagttcgtgattggaaggtctaatgtatgatagtcagtactaatgtatttcattgcttgagtctcattgcaataaatgaaatattgcacaggcacatccattgaccttacgaggcgagcggctgtccaagggatcccccaagcgactacctgcacctgagctttacacggaagattttccctggctgttgaaatagcagaagacttttgggtatttctatgtccttaaatatctttgactatgcaatgcgatagctcatgacccaggttcggtttcaggggcctgaatcccctgagcttccaattccttctttcggaaatattcatctcgctgtgccctcttcctcgcagacttgagtccccttttatgctgatgactatttaaatgaatatgccactggtcctcggatgccattgtcttctggcagacgtcacaggtgtagcacttcccgatagggtctgcctgcacacgcttttcctgggcttccttcgcgctgaactccgccgttgctaactgagaaagcgatttgggatcgggggtcagcttattttgctgcatcagttgcataatctcttcggacggctcagtgatgcacttgctccagtcgctgacattggaactgtctaggagataaagacgacgtgtctctccgacttctgtgagtgcttgccagagtttattgcggatccatttgacctgcgatgttccgtactgtcgtgtggcgatccgaattaattcaagagagtttcgtttgagatcttcgatttctttctcgcttgcttccccgtcccggatagccttgaagtatggcgccaattccttgaatccaatggacacccagactccccgtgtttggtcaacttcaattccctgcgaggctttctcctgcaagtagttcgacatcttctccgcctcggtcatcaagccctgcttgaccatgtcatcgacgcgcgcatccaggcgtgcgttgaggacctccttctcggcatggacccaaaataccaatgtattctcgaaccgtagcagcccttcctcctggtctatcgcctttctcttttgagagaattgctctttataaatctccgatgctcgccgccctgtctgaaaatagatttctaatgaccgccggattttccgtgcatctctcgggtgccatcgcgcagccataacgggatccacctcgcgcagcttctccaagacaacttcaggcgacgaatccagaatcggccatttattcgaggttgtgctaaactccatgagctgttcccgctcgccttcgtcgtccaccccctcgcccacaagctgttctttgaacagcactgcttgggtataatagtgggtgccaccaacaagaatggggaccttgccacgggcgtggatgtcttcaatgactctcagggcttctcgtttgaacagtcctatgcgccatgcttccgcgtctaagtcgatacaactgaggaggtgatgagggataccgttccgttcctctatcgggatctggttcgttatgatcggcaaaccgcggtacatctgcattgcgtcgccattgatgatttcaccattgaatcgagaggccaagtccactgcaagctgtctacagctatcagtcattgtgttcggaggaagttttggaggtacctggagtcattacctttgacttgcctgtgcctgtggcgcccacgacagctatcagcggattcatgattgtttgaccgtgccaaatagatctgagagccgacagcataccgcgatgctccttgcaacgacgtgggggaaaaagttgttatcggttatcaagcgggttacctcagccatggcgtccccaacccctcagggtcgtctcatcttacaatgagctaacatcaaagcagtctagataagtctggattgataaccttgtctgcttcatttttatctccttcttctcaaacttgtcgagtttgcttttttctcagtgcttttttttctcacacattcgtcatggcggataccaattccactcccccatccattgaggtacaaaacctctcgtacaagttccaagatggctccagtggcctggagaacgtaagcatgagcttaccagctggaagccgcaccctattgatcggcggtaagtcaaatccatttccatttcagactaatcttgacgactaaccaaaacacagcaaatggagcggggaaaaccaccctcctccgcctcctatcagggaagcgccttgcacccaataacaccatcgccattggtggtaaggaccccttcaaggacagcctagacggcgtaacctatctgggagtcgagtgggtgttgaacagcatcgtccgcacggacatcgatgtgccgacgcttctcgcctctgtcggtggaaatgcttatccagagcgccgggacgagctgatcgatatcctcgatgtcgatctgcgctggcgtatgcatgccgtctcggatggagaacgccgccgcgtgcagctggccatgggcttgctgcggccgtggcaggttctactgctcgacgagatcactgtcgacttggaccttttgtccaggagcaatttcttagctttcctaaagcgagagactgagacccgcgcctgcactattgtttatgctacccatatcttggataacctcgcccagtggcctacccatttggcccacatgcacttgggcaaggtcaaggcgctgggtagtgttgagtcgttccatgaggaagttcccgcgtggacttcggagaatagtcgtcttggagagctggttcttaagtggctcaaggaggatatgcaggccagaggtccccggaatgatcgcggtaatcaggccaagacctaccagtcccttgagggtattggaggttacggactggaaaaacacgactgaggagaaagatattgatcttttcttatttttcccgttttctttcctgtttttttctttttttttttgcatgctagcactgatgtcgggagtcatgtaacgtgccattcaacaacaattcggttcaaccacaaggcatacacggggttataggttggcatctgcatctacagggtctattcaacatttgggagttttcaacatcacaactcaggctagagatatgtttctttctatacaaatcatgagagtatgtccgagaatatatacgtgtggacatagtcctcacttggtagttctaactgatccctgatctatgatatcgagtcatgagatataaaataggtacaagcatacctataatctaaatatgaagttggtctaacaagataccatagacgttctgtactttgattccactttgttttcgtagatgtcttcgcaaatgccttccaaaatgtttgaatagacctcgtaaagccatagattgtgtgtttgcctgccacatcagaatgtgaaggcggtcatgatctctttatatctttctctccttcctctatctgtctcttctatttctattctctctctctctctctccctcgcacacacaccccccaagaccagaacaaccccggaccctctcaaggccggcttctttgcattttgtcttctcttatttcagggaagtcacaatgcctgacaagggcaaaaaaagagtagcagtaagtgaaaccaagtcgcaaggtttttgtcacgttgaaccttgttgaagcgtctgtttatcccctaccaaaggaggtaatgtcgacatagactgactaattgaaaaatagcaatggtgcacattttgtgagatagaaggccacacccaggaggagtgccatcgctgggctgcctgtctgagagacacggccatggccaataacatctccatgatggcagcatacaagccctcccaggtaaagccaccctataggacattctaggagtcatcttattaatgagtctttggtagaatcagaagaccaacccccacaagaagactcatcgtagctaccgtggtggtcaaaatcgcacaggtatgtaatcttcatacacccaaccctatcttgggcttgattccttggaatatgtggtttgccttgcaatcgcccttgaaacaagcgaaatcagtcatttgacaccacttgattagtggatggcatcaagaaccatcgagacatgtcctaacaatgcgtacttagcccgcaacaacctccctcctcgcccttcttccttcgcccagtctggtatgtgaaccttctcaatttataaaatccggttcctttctatatacctccgagcatcgtttttctggtttgagctgtaggctcgtcctgcggttgtattctatgggttcggcttataggtttagcctaagtattcggcctgtacctgctactgagatgatctgtcagttcaacgttacgatgtttgaattgtgcatttatagctcaaccccacccccaacatctatagggcttactctaaatattgttcaaaggacatatgctaacttgtaggtgattctagtgggcaccattaccgctactcggggtagctctagcgtggagcctgacctgctttcgatattagtgcaggtctctcggtccgaatcagagcttctccttcggttcctagagaaaattaggggagatggaagcgccgacttcgtagagaatctcttgattggggacgaaccaaaacaggaggaaaccacccagggcccctgtaaagaatctggtagtgatgaggtcaagaaggaggcttagtttctcaacggcatacgatgttcttttttcaccttggagtaatttaatgaccctgcatgatgttccttcacttcccacgtacaacaacatatatttcgatagttttgtacgaattgtacattggtttgcgtctgatattaaatagacatttacagacatctcaaaggatctcaaaggattaccgaagggacatctatctacaaagacattaaaaggatatctcaaccatcatgactcataaagggcggctgcctaggtaaaactatcttggttctcgtataaatcatgagagcatgttcgagatagcatatatccgtgtggacgtgtcttcacttgccaccgccaattcgaatcgatctctgctatcctctgcagccggcactggtcgccatgataattgagtaatcgtctttgagggcgagacctctttgtcaatggtcacgacgtgctgtgcttcgagggtatcagcagcactccggtggatggagatgacaccattatcctcgccgacagcaataacgtatgtgcctttgtatattatgggcaagaaagcaatttctgagacggccgatgtcagggccacggtcgttttgcaaacgaaagtgtcttcagacttttgccagatcttcacagatttgtcacgtcctgccgtagcaaagacatagtctgttgtagctggggcccaggccgcacctaggatcattcgagagtgacccttagggttcaagctgaagtttgtaaaggtagttgggtctgtatcgctccgctggaagaccgcccattggcgatctcgtccaacactgagaagataacgatcgtcactcgagaatgagaggtccgtgatggttaacgagtgcgcagtgagagaaggcttgatctcatgccagtctgacgtatcgtagaggcgaattaccgcatggtcaatcgagctggccttgcaggcagtagcaatgagcctacggtcatggcttactgccactgctgatatctcataaccatggccatagagcttttcatgctccggccacaaggtgtaacgagacaactggtcctccagcggcgggtggttggcagctagcaaggcagaggcgactggcgcctcagttggggctttttccccgtcctcttccactggtgcctcatctccaagtgccttgttcgaaagacccagcactggaatctcagcagtgtctgggaggtcctgatcattcgattgtttgaacccagtgagtctctcgagcaactgagcaatttgtttgggctcgttgaacacacgcaagagcttctcctctgcaccagtcacgaactgtgagggacccagagtatcgacacagttcaaatcgtacccatgaatctgagggcgggaaaattcatgccatgaacctgtatttccccgtacccactttgcatgaagccgcgtggtttggtctgaactcgttgaaagcaggtagcctccagtgggctcccattgtaaaccgtttgcggagcgcacatgacccgaaataccaaacctctgtacccaaatatccgagtcggactcaagtcgccaaactctccaacttcctgtccggccaagacttaccacctgcctcccatctggtgaccagagcccaatccagaagccacctgcactaccagtcgccgtggtagatcctttttggacactgatctctcccattctctctgtggacatccagacgcctgatgcttggtcttgttcccaaattgtgatggtattatcagccgatgccgaaagaagttgctgccgcttcgaatcaggattccacgcaatagtataaatccaatcttcatgcccaaagagaagagcctcgaaagtaattgagtatttcgatcctgcagcctcaaactcatgggctttgttcgatagcgtaggctccattcctccaagcagaggatctgtatcgtctattggagcaggtacacttgcttcaccccgacgaagtcgccagagacggatgtatctgtcttgacttgcagacgctagcaggatatcgccgttgctctgcttgtcctgagtgaacgcaagagccttaatccaggcttcatgtcccccaagtacggcccgatgcttgaattctggcttgccgatggaggtttccgagacgtaaatatgaaccttggtcgttgtacctgcaacggccaacaccaatggcttgtccgagtcgccttcaagtccctgcaatgatagagatagtgggaagaaccttggtaccattgtgatcatttcaagtagctcgcatttcaacccatcctgtgcatttattctccaggtccggaccgtcccatcagccgctccagatgcgatgatatccgttccatcggcgacagcaatcgcattcacggagcccgtgtgaccctcaagggtagatgcaagtacatagttgtggggatcggcatcgtcttttttccatacccgtattgtgcggtcgacggagccggtgacgataaatctcgttcctgaggcggggcatgtataaaatcgaacgacgctgactttgtcggtatggcccacaagcagagcatggatgccacgatcattcttgtccttggttaagtgtcagcttgtcgttatcaatgcgcaattgttctcaatagacctactagaggatcccataaggcgacattgttgtccgcaccgaaggcgagcaagcctgtctgcgcatcccaatccgcggcaccagggtgccggtttccccccacgctgatatattctgtgtcgacggcgaccatagagtactatgagggcttatgaaccctttgtctgtctgtgctgctgtactgggggaatcaattggaggaaagccgcaaagaaattgcgggaaaattggggcttatcgataagaggtgtctccgcctagcccctccatcttctcaacagactcgacttgtgatctctttacattcttctcaataagcagagataactcctatatgctctatattcaccttcgtctacaacgccatggctgatacttcaaatgcggaccagggagagttccccatctctatcaccgtcgagtttacgtacgtcaaatctttccttcaattgatcaagctctgctgataattgattcttcgatagcggcggcttagaattgctattcggaaatgagcgtaagcataaggttgttctgcctgctcgtttagaggacggcagccggccaaacatctcatacctgcttaaatacctggtcaacaacctcatgaaggatcaaaggatagacatgttcatcatggaggacaatgtgtatgtcaacataacttcgggggttgaacagtattaatggttcgacagacgaccaggaattctcgtcctcatcaacgatgccgattgggaactcgaaggcgaagagacatatgaacttcaacaaggagataacattgtttttgtctcaactttacatggcggttaaacatgattgattgtattgatattatcaacgcaattaagacaaaaaaaaacttgattcgaagtgggctggaagaatgtgagggcaacataaagcgtggacttttacctagaccacatcttcaacatgctgttgtgagatccgttcgcgctcacgcggtgttcggattccactgggtgttcgatgaccactctgtggggttacttgaccatctgggctaccaagcccttgcgccggtgataccaccccacttgggggcactgggatcttcaaatcctctggagaggccgggataatctcttcggggaggtcggggatatggattcgctgtgcctcgttctgatagctctcgggaaggatctgcaatagtgtcaattaaccatagatattaatccaacccaaagtccaatttacctcaatgatctcatcgcgagggaattcaaggaacggaatgtctgcagcattgcaggccatgagatagccatacaaaaccctcaagacactctcgtgtgcaatgatgagcagatcggtttgctccctctccaattcaagaataattggctcgaggcgaacagccaagtcatgataggactagtgcaaatggtcagcagttacacactttgagggggggttggtcaaggcctacctctgcccgtggataacggtggtggtagggatcaagctcgtgcttagcaacctcgtcaccaaactctgctcggatacgatcctcagacatcttctcacaaacaccagggttcagttggctcaattgggacctctgtcggactttatatccgttttcatggaagtactttgcggtttccactgttctgcggcgtgtggaagtccaaaccttcaagggccttgactcatagccagtctctcctcgttcaatcattgcttgcttttcttcttcccggtgagctagaagacgtgccgtcattttcttggcgtagtcttccccctgatccgatagcgaagtatcggctttgtatgaacctgcgtctagcgaaacgccagcctaggtaaaatgtcaggatttttgcatcgtacaatatggactgtaggtgacctacccgagcgaagtacgtgcgtctcgatttgatatggagatttagaagatagaagacgatacggttagagagataaccgaagcttcgattgttgacaatcaatctctcgccggcattgatcatctgtatttgggtgagtaatgggaataggaaagaatcaattgcgcgtaccttgataaagttcaagtccttttcctccatggtctggaattgggggatccgagaatagatacggttcaagtaatgcttcacggcatcttctgatttccacgagacgtactagcatagtttgtcagtttccattcaatgccaatatatacatgagactcacatcaggggaggagatcttgactctgcgaacattctcttcaatgatgcgttcgtcgtcacaccacgactcaatgaacagggtctggtaaaagataattagtctattgtcaaagattcaaatgatcaactctgacttgcctcgatatcatgcttcgcaaactccttggcaagcgagcgccgtcctgagactagcgggttgacggcatcatatatcgctatttgaccattttcatgattcaaaaagtgatagatgtcttctcggcattttctcacaatcttttggcgtagaaggacggacttggcagtcgctaaacggaaatgtcaatatggtcattcaggtagctcaggataccatgcctaccattgacatagaaataatcatctggcatgtcctcgccaaatggaattgtggcacgacggtagtcgcctagatggaagattctggttttgacaccaagcctatcaatgcatcagcatacctgtaaatgcgcaaatcacaggagtaaggcataccatcgcaggtatcgtgccaaagctactgagatatgtctgtcatagagttgtaattagttcaccgcgcaacactaatctcaatgttaagaagtttcatacgttttgcctctggcaggcaagccgacggtaatgatcacaatgcggcccgaatggaaaagccgaccagattcggtgctgtacagctgggccggagccaaatccgccttttccggcaagtcatgaattgcatcgacaaagattgaggacttgcgacggaatcgtggggagttggccacaatctcagcggtgctatatgatgtcagttcaaatccacatcaggctacactcttcggccagggtatggctcgtgctttctcttcttcttttctcctttttcctgacattattgtcaagcaaaaagcacacacaagacaacatttcaactctcatggagaagacatgagattgggaagagggaaaggcaggcttacagtaaagtgtccatggtgggatgtcgaggtggcgcaaccttgagatgttgagatatcacaagattcagtatccagcgtgtcaggggtatcgatcgatagctctgagagagaccagatattcctagtcacgtcagccgatggcaagacagtgaagggagcgagaaacaaggaacaaggaaggtacctgagaggcggtataggtaatcgattaaggctcagataactatcaggtgcagctcatgggcttttatttgcctcgtttttcaggctgcaatatgcaaagtgatgcaagcacaattccacaccaaatagaatggaaaagaaagaagcacactgcaaagatcaattgatatcaggtcaaatccccccaatccttcccaatccctccggtcttgcctgaaccgggagagcccgaagcagcttatgtaatatcccggtgaacggcagcaaccaaagacgccgaggcaggtgactagcatttttcacagcttagaagtcttgaattgcttctcctacactcccgagcgcatcagatccagccctttttactctattttatcaaggtcatctgagacgtttgttcgtcccagatcctcgggctggtctcaatcccttttattctctattcttttgtgttttcccccgagtctcaattgagaccgagtaacacgcgtgacgacacctaattattcgtcaattatcagatttcaaccaaaatggccgattacctatcatctctctcctttctcacagagaaccctgccgctgcggctattaacgatgcatactcctcgttctccgaccgaagggccttgctcaacctacccaaccccggcactgtcgataacctggccagggaagtgcagaaggatgttctattgaccaacttcatgttctccggtctccgggcagacctgaccaaggtcttcggcatgtcccctcttttccgtgtgtcgcatgccttctctatgggctcaaccggcaatctgcctccatatgctttctccgccatgtacggaagccccagggtaaggacaactattccatgcgatgccgatcaccacaaatatcagtatttaacatatcgtcccccgataggtgtttatgcagggtaactacggaagtgacggtgccctcgccgccgtcgccaactaccgctggaaccaggcccttgtcaccaagaccaatgctcagatcatgaacggcggtagccagggcttggtccagatagataacgactacactggccgtgacttctccgcgtccctcaaggccttcaacccctctctcctcgagggtggtctcaccggtatcttcgtcggcagctacttgcagtccatcacccccagcctcgctcttggtttcgaggctatctggcaacgccaggccatcaccgctcgccccgagacagctctgtcctactccgccaagtataagggtgaggactggattggtaccgctcagctccaggcccagggcactttcaacgccacttactggcgcaagctgtccgagcgtgttgaggctggtattgacatgaacctccaactccaaccctctcccgctactcttatgatgggtggtccttctcgtgacggtaccactgccattggtgccaagtacgacttccgtgcgtcttcgttccgcgcccaggttgacagcaccggcaaggtcagctgtctccttgagaagcgtattgctatgcccatctctctctccttcgctggtgagatcgaccaggccaaggtaagcgacatatcttttttaaattcctattgatgtcaatgctaattatcttcttttctttctagcaaacggccaagctcggtcttgctgtctcccttgagcttgctggtgaggatgtcatggagcagcaggacaaggttgaccctgctaccatgatccctcctcccttctaaatctctcctctcgcatcgcccgagataataaccctttcaccccccatgttttagtagttcttcactctcatgtctgaaatgacatatgtttgtctctcttcctcggtatatcctcttgaatttgggttgctggtgcaggtggccagttgtttggcgccctggagattccaacgttttttttgtatagattcacactccggttctttgatttccttttccattaccacctgatgctgcatctctgtttggcctgtggtctgatatcttgtgtctccttgctatctttccagttcatttccttgcatggccatgttttgggtctatgggattgccaggcctgggatgcatggctgcgcctgcagatagctctggttatgtttttcgcatcatagaggggccaatgtaaaacaagttttgatttagttgagtttggttaagttgagtcaattgtaatgatttcattgtgaagtgtttcttgctaaggatgtccatggtgcggtcaactctttgtccatgtggatcaatgtatactccgtagtgaactatgcgttggcattgccaaaaatcagaccattcaacatctatattgatctttctttgaaggaattttcaattatttctcataactaaagacaaagctgtacttcgtactttatccgcagatatcaaacaagacacaaagcggagaggaaaatagtcccggataatgcccgcatacacccaaagcggtgaccgggacgaacgatggcattttccaagacaaatcagacgaatccatccaacatcgctccactatatgcagtgggcactggagcacctcctgcaattggtagacgactccggagtgcagcagtggccttatgcatctcctagaatgggaaccgtctctgctttcttctccacttcattatgggactaagtttctcgataaagtgggttcgtttatatgttgggtctcccatgtttcgctctcgaaaatgatacggagggttattgtggggtgtttgtcctggaatagaaaatgaggtacggtgcagacgagatttaggcacggtgtgctatggcactttcgctcccatatgacatgtgggatcttcagccacttactccatattccagcccgatggcagtcgtagatgggccatacgcacccagttccctgcttggagtgtggctgggttggagtgctgcctcgctattggaagtcccgcggttgatagtcgttcagacgctaattatctgactccagtgacatcatattccccgttccaccctctttttagggctttgtcctttttttgaacttggcggttgccctatgtagaagggactggccagtcatcttcgaggccggatatgcacctaaggatgtatgttccggataaatggctgaccccgggaataatcttctaggcgaatcagaattgaaagcagaatgaaatgaaaaaaattgaaaaggaagagaaaggaaattacagtttagagggggtccgagtgtgtcggcccaattgacaggcttagttttggtaatacacaacataggacatgctgttctcaataatatgatttctggaaatgaatgtgggtagcgtgtccacaagacacattcattcccctgaggttcattggtaggttgggcgatttagaattgtatttcgttctaccggtacggagtaccatggaggtcttgcccagggttgtataccttggcatgtaaacgatacttgttcctcggccggagaatcatgtaatcatacagtaactaactatgatatctactaaggttcttctatgttggaatatgaatatgaatagacgcaatgtgtgcttttcaacagatcggtagatttagatcgtcatgaacccgtagcgtggaagactggatccaatttggagattgaaccaatagcctctaggatgattcgcataattgcttgaatcttgggtacgatgtacaccgtaagtatcactttcaacctggaagacgccaagtgctattcgtacatcttatatctcattatacttagcctgcgatatcacccacgtgtctgatagagacctcgaatggaatgccgttccttgcttccatgctttcatgatctgtacatgccgacggtgcactattgggctggcattccgacggtttcctcccatgcatatgcattgacattttaaacatcatgccagtgccgggaggtgttgcttttgccaggaacacacccgattctcatcccgggtccgtgaaacaatagtgctactggtatgcacattgtgcaattttatacattggatacattgtcggggatgtatacggtggatatggacgtccaagggtctatgatgtgtgggttcccaggctgggtcagtattggatattgaatggaatccactatccttaaaaggtaagcagttcgatccattgctgattgatattgagtagcgtcagcaaatggctgggcatcttgttagccgagacccgatggacatatcggaatcccgagtgtacacctgcagtcgtggtaccgatgcatggttctggatatttcaggttgacggcgtcagacccctgctgatggggcgtcaaattctgttttgcctcgtgtcaagcagattaactaatgtcgcatgacaagttgaactgtggcgattcggatccgtcagccatggtcacctgctctcggtctggtgacgtcgatgaggggaagctatagtttaaatttacggagtagatggcgagaatgtagatatttctttggaatgctaagatatgacaaatgatcttgctgggcgaatttgctgagcatctatagagttaggggaagagaatactataactattgtatatggtagttgatcataaataataaatgcgttgccaatcaaatccaaatgtcacgctcaaataccagtaaataccaatacaatacaatacaatacaccaggtaagctcctcaacgttaaccgtttaagcctggtgcatccctacggagttcagtcctctttagtacctgagctggtgccaggaaccaacattcctccccccttcatcagaaggtttctttttcccacttaatacctgaattcataatttattgtctttctgatacatctcattctgcctgccggtccagatctttggtacaagagactgcatggacgggactacggctggaatcccaacgatggcgtcggctgagatagcttcgactcacatgccaaggaacccctgcaccaatgcacttgatagcatcgagatccctcgaaagaatggaagtgcaacgggagcccctttcaattccgatggattatccgggccgaagagctgtgactattgtatatggctttccaaccgctcggtctggatcccaattaccggtgtgttaattattattatttttctcggaatgtccctgttatgcagcgacacagatagaaagccaaaaatgatttagctagtctgtcgttagtagtatactagtcgatattattagttatagaagctggaataactagtgcctccagctcccattgtcgctggggccgtctctcggcccaagctccttttttttcgaggtcagctggtctcgtgatagcaaagaccgcttacagtacagtaatggccaataacggtggttccagggaaaatcaccgttgggtcacccgacatcctgtttcttttgtatgggatgttaggggtgttaggctataaacagattgagtctgtccatgatactatgtatagctcgttatattcccactaccccggagactccgctttctccaaagtcttttctttggttttacggtatggtaattacgccatcacgtatgatatcatctcccgacgtggaaatacggtcagtgacaatactatactgtaaggaataatcgagaattgcatcttgattcgagataatagtgactggtaaatagtggtagttcaatagtgattaactacatgtatatgtatgctatgtatgtaacttataaaacacaaaaaaaaaaaaaccaactcccattacctgagaaagttggatttcaacttgaccttgtagctctcccgcccctctctttttcctcttttcccctcccgaattgctcaaaccccaagacaattggctttgatcgtgaatcctccctcctgaatttgtttctttcacacaactcaagaatcagatccaaaaaaaaaaaaaacacgtgaaaaaggaccagaaagaaaggaactccattccatcaacgtcacctttcttttggccctgaacccgccccaattttacctaaccttccctagtctaacccgtcttatttcactcgattcgacttcattggttgaacattctctacgcaaagttgcccaccttctcctctctcattcttcttcctcttccctacttttactacattcttggctcccgggtgtgccattttgcttcctttcccatcggtccttccgcccctccctactccaccccggtttaccacccaaaacggtcttctccccttcacatctctatctatcgccgcgatgtcacaaaatcgacccggattgttcccgactttgcgcatgggtggtaagatatatcaatcgcctttttaatcgggagacaactgaccgcgtccagaggtcatccgggagaaggtccaggatggactgactggcgaatccaaggagatctcctacacccagtgcaagatcgtgggcaatggctccttcggtgtcgtgtttcagaccaagatggctccgagcggggaagatgctgccatcaagagagtcctccaggataagcggttcaaggtaaatcaaatcggcttctctcactctggagacctctctctgtgtgtgtgtgtgttggactaaccccagtctctcgcagaaccgtgagctgcagatcatgcggatcgtgcgccatcctaacatcgtcgaactcaaagccttttactactccaatggcgacagggtatgtgtctcctgggtgtcccgcccgatcgtcttcccgtcccccgttccccgttccccgtgggctgaccgtgcccccgatctccccctcaaatagaaagatgaagtctaccttaacctcgtcctcgagtatgtgcccgagaccgtgtaccgcgcatcgcgttacttcaacaaactcaagactaccatgcccatgctagaggtcaagctttacatctaccaactgttccggtcgctggcctacatccactcacagggtatctgccaccgggatatcaagcctcagaacctccttttagatcccgccacgggtattctgaagctctgcgatttcggatccgctaagattctgatcgaaaacgagcccaacgtgtcatacatctgctctcgctactaccgggcgcccgaattaatctttggcgcgaccaactacacaacaaagattggtgaatatcccttttgtctgcccaaaaccatattgagttctaaccattactgtcctagatgtttggtccactggttgtgtgatggcggaattgatgcttggacagcccctcttccccggtgaatcgggcattgaccagctggtggaaatcatcaaggttttgggcaccccaactcgagaacaaatccgcaccatgaaccccaactatatggagcacaagttccctcaaatcaagccccatcccttcaacaaggtattttatgacccccgtacccccggtccgtaatggtgctgaccgtactaggttttccgtaaggcgccacccgaggctattgacctcatctccgcccttctggaatacaccccgacacaacggttgtccgcggtggaagccatgtgccaccccttcttcgatgagctccgcgaccccaacactcggctaccggactcgcgccaccacaacaacccccctaaggatctccccgcccttttcgatttctcacaacatggtacaatctcccgccctctctagacacaacccccactaatccaccatctagaactttcgattgcccctgaactcaacgcccagatgattccccctcacgctcgcccagccctcgaagctcgcggcctcggcctcgataccttcaaaccccttaccaaggaggagatgcttgcacaccttgattgagttgaccagagagtgtcctccgccctccgcgagggatacgtatgttcgttgtgccgccatctgcactttgcgtgagattcgacctgccaaccaagttccatgatctcgggtaagctctgaattgagattgcactgccttgtcttttttttctttttcgtcggggactcggtatgcctccgccccggacatggtggatccttggaactggaatgagcagggaatggtatgagatgggaaaagtgcatcctttaatggctgggaagcggaaaccatgtttcttcggggtggtaaaggttgatggttttcacgcaatgggaggtcatggcctggagtttattttgaggtgtctgagacagctctcgggaggaaaaagtgataccctttctgtgcacgtctgcctttgggggtcggacactgcatagtttcatcggtcgaggggaagaacctccagacgcagcaagtcgatctcgcctccggaggggtgaatcttcccacaaatgcatcggagatcttgaagatttctttggatacacgcacgtttagggaggacccttctatggtcaatctctcgtcttgcagcgctagaatccccgttcgttcttccctttgcgtccttgctttcttttttttttgttcgcaatatccttgtatcagattcatcgggctcggctggttccccggtcctccgacttaccggccatgagctatatgtcattccagttctcaagcagacaattttctttttctttggggtaatgcgtaaagaatcaataggatttgaacggtgtaattttctagtatgtgaggaatattcaattatcctacattgtctaatacctatgtagtgacctagtagtgtcgttcgttacatgtctggtccgttgagatacttcccgcaggggcaccgggtccggaacttcaatttccccttccgagctccccattcacctcaagctagctgtcaccctcgttttctacttccccagaatcactgtctctacgatagcaatctggtattacactggctcattggattgattccagaacataatggccgaaaacgaccgacgaaaccagggctacaggggtgggcgcaaacgtcgctacagaggtgagaacatgaatctaagcttcccaaacaacacgctaacttggctgtaattcttacagatgatgatgactttgatcgccgcccccaaagacgcagatatgaagagccattgttcgtccaggtgcgacggcagttgttgaccatcgcggaatcggtacgcgcctcgtttttttttttttttccgccgcgcgcattgcgctctacaaatggtggatatgaactaacgcttatgtctcattaataggctgctcgcagagcagaagatgacgtccagggtattgcgaagacagtcacggataactacgacgacgaggagatccgccgcgactttgtcaacatctcccttgatctgtacgtgtcggtgtactcaaccacttcggagtattactaacttggatatctgcagcgttctcgaacaacccatgaaaattccttttatcgccggcacggtcctggtcgcacatggtctcaagcctgagcttggatccgaggttttgagcaaggcagctgaggccttgcagaagtatatcgacattggcgcatggcgtgaagtcaagcttcttattcgctttctgggtattctccagccagtctatgagggtgatggcatcttccctcttctggaagagctgttcgctcgtgcagtcgatcttcagactgcctcttcggaagatgtaagttgggattaatcgacctgtgatgtgaacctcatctaacagcttctagcttcttggccttgaattggtaaagatcattcagttcaccattccttatgtcatgctgtcccccgccactggcttcgaagcccaggcttccgcacttctggagaagaccgacattattgcgtctacgccgcacgccctcgtcgatctggtgaacacattcagccccgaggagaatcaggaggcagctggtcaaagtgttatcagtttgatgcagactcaacttcaaggggaggccaaccggggctgggagcttaagtgcctccctcgtccttggaacgatgtccctgacgccgagacggatgagcccaagtctttcgagtcggtgaccaaggttcctttccccacgatcaccgtgcctaatcctgtaccgaacggcgcgcgtcctctcttcccagaggtctacctttcggtgtatgccaaccaagaagtagacaccgtccctgcgatcacagacatctcctcttcgcttattcgggatgcactggtagacaccattaacctccttgacttcaaccgcgttgctacggccaagttcctgatcgatatcgactgctattttgcctctaccacattcgtgaagcgcgccacgcctttcgaccgaatgcgcgagctcatcggagaggtgcagccgtggaagcccgaggatgtggcagtggacgcagtcttctcgcagctattccaattgccagcgtcggaacacaaactggtctactatcactctgttctcaccgagtgctgcaagatcgcccctgcagcaattgcgccgagtttgggtcgtgcaatccgattcttgtataacagcctggaaacaatggatttggagcttagcaaccgtttcctggactggtttgcgcaccacttgagcaactttgggtttacatggaaatggagcgagtggtaagtcgacaatgtcagcttctacacggtgtaatcggtcattaacaatttcacagggccgacgatcttgatctgccctccattgatccaagaatggcgttcatccatggtgctttggacaaggaaattcggttgagcttcgctcagcgcattaagggaactcttcctgatccctaccccaagttgatcacagcaggcaaagagaaggataccccggaattcaaatattcctccgaaagtaaatttaattcgtggcccaaatggcagagaatgtggctaacctgaacttccagtggcaccatattccaaagaaggacaagaactcatgcagcttattcggaagaaggctagcgacgaagaaatccagcccgtcatcaccgccattgaagaccaggccaaaagccagggcgttgacgaccccaagatcccctcgacagatgcattcgtaacatcactctgcttcgtcgggtcgaaatcgctctctcacgttttgtcatgcatcgaacggagcaaagaccgtcttctggccatcggcacggaatcgccacacgcccgctgccaaataatcacctccgtcatggagtactgggtcgatcagcctggtattgctatcaacatcatcgacaagctgcttaactacaccatcctcagcccgctctccgtcctcgaatgggctctctccgagtctgtcgcggcaggaaccatcctcgcaaagccccacatcttcgagatgatctccgccaccgtaggcaaggtcactaaccgcatgcgccagatcgtcgccgcccgcgtccagcccggcctctacgagccccagcttagcgtcatcgacgagaccctcgcgagcgagcgcacagacatgcaagccctcttcaagtacatcgaggactctatcgtctccatcgccgcgggaagcaacgatgagctgatggagcgcggtgatggcagcggcactctccccgaggacgccatcatccgccaatggggtcgtcgctggctccgcgtgttccggagaaaagctgccgtcgaggaatccttcatctctgatgccctggctaacgccactcccctcggcacccaggccccgcctgtttctgtgcgggagggtgctgcggatggagatttggatattgccgatgccgatgcgcaatagagctgtcacaaatatggatgccatctcgatgaggtattagcttatgcatgctgcgttctcgcatttgatctctttgagctttttcattaaatgacttatgtcccggagagcctttttctgcctttttctccattgctcctctgtattgtacactccaactccgggtctttgaatggctgacagaaatatgaaaatctctctccgattattccaaattaacctttctcgattcttctcgagacacaacgaatatgcgggttgccgacctacaccactgaagttgtacaaaactagaaaaaaaaaaagaaacaccccaagaccatgttgattcaaccgtacaaccctaacgcggggatatcccaaattcaaaatacatatgaaagtcttcgtaaatcgtgtacatcttgataaacccaaaggaaaataatgagaaaaagagtgaaatccaactaggacttggatccagaagacaatgagatagaacaataacaaaaagggaattaattgtggaagccacatggaaaccagtaagaaataagaacagggatatcagaaaggggtcatcagtagataaatacaaagcaatataaaagaagaatgaaaagaaatgtccgaaaccaaacccaatcaatgcccatgaccatggccatgaccatgaacatgaacatgaggcttgcgctcaatataataggaatccccatcatcgccatcactgctagaagtattataaacggagaagccatcctcaaagctcccacggcgcatctgcatctgcaactgcatcttcgaaacgccctcctcagacccaacagactgtattcggtccatgaggactcgatccacgggggcacatctactctttgggtcagaccgtctcgtcattgagattcgccggtccttgccacggcccttgatgcccttgttgctgtttttgtatagcccggcgaaatatatccagagatcgcgatctgccgcattcatgttcatcggtccattctcggccatttgtgagaaccggatcgttagattgtggagtgttgctgcgtggaatttgttttggtgtgactgttttgggataaggggttagttagcatgggttggcttaaacggtggtgttgtatggaagtattgatggagggttatcataaggaggacaaaaacttaccttgaggttgcctaactgggtgaactgcttgccacattcatctaaacggcagtcaaaccgtttagattgatcatgggtgagcctgtgagcgcggaggttgcctcgctgagcgaatggcttgtggcagatgtcacattgaaagggtttttcgccggtgtgtcgccgctgatgggtctaggttttagcacacatgtcagtgtctgcctcgtgcatcgcaatcgcctggcgcggcagctggtgatgtgcttaccttgaggttgccttgctgcgagaagcgctgcccgcatgagggttccttgcatatctgccccattcaaactggttagttgctgtcttaaaacatttgattcaatttggatagacatatgacaagtgtactcacaaatggcttgtcacccgtgtgtgccctgatatggatttctaggtgtgttttctgcgcgaagcttttaccacagcctgggagggtgcagttgtacttgcgcttcctccgcgatggctgagtttcattggcagggtaccgcggtggcgttggcgaggcagtcgggtaggatccggcataagtctgtggtgccgggggtgccggatgctggagtggtggcagcgattgctggatcagtaatgaagcatgcttggcctgaattgccttcatcaggacatccacgttggttgagaaggcgagatcagtggtggtttgcttcgtctcgttttttgccccgactggtgaactgtggcttccagtcgagatatgcacccgtggagcatggtcgggagtagacttgattgtatggctgatggcgttcttcgccggacgaatctctggaagagactgcaacggttgtgctgttgtgcgcagtggttgcggctgtaacgggtgctgactatggacaaagtattgctgatagggattcgagtgtgcatgtgtgtgacccacagagtgaccgaagctgtaaggcaagctacttgaggtctggtaatgcagcgagtatgatgctgtttgatgcgaatagaagggaaagttatggctcagggtcgagtctatcgagcgtctgtgtgcaaacgcactcacggcatggccagggaagtcgtaagagacgggctctgaggtctccatcttgatgactgtttgaggtcttcctctcgggatctttcagaaaggtaaggataccttctccctccggatctccaacgagataccaatgtatctcaatgtatacctgtcctcgggatgtgctggggagtttttttttttctgaatagtctttgactatgctctgagacccaatccccggtgatatttgggttctggctggcaacgagttctcagaaagaagcaaggatggggaaaatagacaaaccggccggccaaagcgcaatccgttagatctggatgtatatatgtgagataaagaggagaggaaatagcaaatatatgcaggtcattcatgaaaagcgagaaatataatgattgacaactagtgatgatcttccgcatcgaccgtggcgcctcccgatctagatatacctgcaatggcgggggcgacagggggaggggaggcagnnnnnnnnnnnnnnnnnnnnnnnnnnnnnnnnnnnnnnnnnnnnnnnnnnnnnnnnnnnnnnnnnnnnnnnnnnnnnnnnnnnnnnnnnnnnnnnnnnnnnnnnnnnnnnnnnnnnnnnnnnnnnnnnnnnnnnnnnnnnnnnnnnnnnnnnnnnnnnnnnnnnnnnnnnnnnnnnnnnnnnnnnnnnnnnnnnnnnnnnnnnnnnnnnnnnnnnnnnnnnnnnnnnnnnnnnnnnnnnnnnnnnnnnnnnnnnnnnnnnnnnnnnnnnnnnnnnnnnnnnnnnnnnnnnnnnnnnnnnnnnnnnnnnnnnnnnnnnnnnnnnnnnnnnnnnnnnnnnnnnnnnnnnnnnnnnnnnnnnnnnnnnnnnnnnnnnnnnnnnnnnnnnnnnnnnnnnnnnnnncccccggtatagaaatcgccgggaaggggggggggggagggggggaggggagtcagccggtgaaatagttgaaaagccccatttcgcctgtatgacgtttggtaattcgatttataaaaattgggaaaaaagggggggggaagaagggcagttcaaggccagagatacatgcaactgtgtatagtgtgtctgattcgacgatctccgtgggccggggatcctgggcgattgaggcgacctgactccaccggaaaataatagaaaaagaaaaaaagaattccaatcaaagggacgaactggggttcctggggtttcgtggagctttgggagccctagagagccctggccctgaggccctgaagcactggaggtgcattgcatggtctatgaagatgcattttggacgcatcgattcctgtaccacaaggaatagtaatttctcattagtcgtaatgtattttgatacatttggtgtgaaatgtgtgtcagtcacacgaatatactcgcagccgcgactggcgacgaaagccttcagctcgttcccctatacttcttccatacttccttctctggatacttctgtaactgatattgttgaagagactgacatctgtcagactcataatctcagaaaaagaaaacacgcaaactcatcgtgctgtgcatctcccctcgaggagacgggccgggcctttcaatgaattcgcaagtggaccgtgatcgacctgcagtcgacatgtagattattcagtcgatctcggagtcagcaatcgctcaatggctagctaggccgtaattacgagtactaggatgcgccatcccgatagtcgccaatagcgtccgatctcagcccatcgaatatcctagttagccgcccaaggctttggaaaattcaggctgatctgaatctcctgaagagccaatcaaattgacctctcccatctagtgagatctgtctctgtctctcttttgagccaagtgggagtcgattgtggcccttaataggaggaatcaatcagcacgggctttggattggtgtcgatatatttcccctccccccttaaactgcgaatggcttggctcatgggccatgtcgatcatagctactcgtggtcttagctccatactgggaacgatccgagaaatgacagccatgaccatctgacacgagtaaccctgcacgtcctgcatcgagatgaggtatcgggacttgtcaagaatggttcctgcagggatgcgactagtcctcacgaactacttcctgaatgggcgaaggctagactatgcatacgcattaagcctagctcggtgctttgacgagatttggatcagcatgtctccgtagggggtgtaggggatttgaggtgtttattaccgagcttttgacaaaatattattcggagtattccgtattccgtattccaagtctttcggagtacaaaatgtcggaggctctgtggtgattcagacggacagggatgtagttgggatgagattcagctttccagaatgtccgtgtgaccactgccctttacatctacaacatacatgacaataaaccaggtgtaaagaatggcgattttgaaattgaaaaagggaattcacgtatacactaaagcgcacaaagtgtataaagtaaagaatagaaacaaaattctgcataaataaagcccaccaaagcaaaaacatcatattgcgcccaaaggatcaaccctttcatcgtccagtatacgccgagtatctagaaaacaagtcagcttacgatcctgaaacacactcgggacaactcacctccagattcgtgcacgcatgtctccactgccggtcgcgaacaggttgccagtaggactgggtgcaaccgagatgactattcggagttaaagagtcagagatgataatgcaagctaggattgtatgaaactcaccagagttcttgtggccttgaagcatcatttgggcatttccagtcactgggtcccagaactgaacaccacggtccttggaaccactcatcacccaagcaccgtcgggtgtcaggcacacactgagaacaaagtcctatattgtagtcaaaaggttagcttctgcctatctcgctcaagtaatctcagatctaaccttgtggccctcgaatgtacgaatacacttgccgcccttgacggcactgtgagggtgcatgccccggggaacggtaagctcccagagcttgatagtcttgtccagactgccactgacaaggtcacggccgttgggtgcaaacgcgaccgagtaaacaatgtccttgtggccatctgggctctctaggcgttctaccaggtatccagttgtagtgtcccaaacgcgcacgctcttgtccaacgagcccgcggctacgtaacggccatccggagacatggccacagtagtgacaccatcctcaatgctaagggtgtagacaagcttgccgtcgagaatatcccaaaggcgcacggtcttatctccactgccagaggcgatgaatcgaccgttgccagcaaagtccaaagagtagatgtcctgctcgtgtccactgaagatatgtttgatggtgcgctggttgatatcccaaacctagagccaatcgcattcagtcagtaatcttcctacatagctggttccatataatctcaagacttacccgaatctgcttatcttcagcaccagtcgcaagatatttgccatccggactgaagcaaacgctgcgaatgtataagtcgccgtccttgtcgacgttttcatcctgcaaggtggccacattttgaccggtggtcacgtcgaagatttgagccgagcggttacagcctgtagccaagtatttgccgtcacggctaaagcgcacacagcaaacgacgctgtcgtggttcaagtgatgtaccagttccacatcgagaacacgctggacctcggggttgaacacggcataccaatcagaaccctcacgcttctgcgacggaggcaaatcatcggggttccagtttgccagcatatttcctggacgttcggctgtgcggccgagaggggggttcggaggagtcgggcgagggatctgaggggaagcacgaggatccgggtaggcgatgtgcgtttgctggggggtaccggggcctgggggaacgcgaccacggcccttaccagggcctggggatgcagtaggaggtggaggcggcccatagcctaggagatgaacaatccaacaggtcagcaaactgggcgacaactttcataaacacaacgacataccgttcacagcagcgccagccggatatcctccaaaggagctctgctggggttgcggcgcgccaggctgagcgaccgaagcaggctgttgaaggggatgctggggaggctgctgatcctggggaagggaaggtgcaagaccggggccactacctggtgggttggtcatgataccgccaaacagattgctggggccgtggcccaaggcaggtgggggagcctgggaaggagctgtatgagccgccgcgggtccgccgatgtgggaagggatagattgcacgccacgggactcaagttcgtgtcgcagcattcggatctcagcttcatagctaaaaaggaaaaatgtaatgtcagaaagggttattcaagctttcaagaaggtaggagggacgaactcttgcttgatcttgatctgcgcctgttccagttgatagaccttctgacggatcatctccatctcctggagctgtccggtcactgcatgatctgtcagttagataacacttcagcgaatgtcggaaaccatggagctgcagtcattgggggaaatgagctgcagctgcttgtatgggggggggggggggggggggggggggggggggtgggggggggggggggggggggggggggggggggtgggggggggggggggggggggggggggggggggtgggggggggggggggggggggggggggggggggtgggggggggggggggggggggggggggggggggtgggggggggggggggggggggggggggggggggtgggggggggggggggggggggggggggggggggtgggggggggggggggggggggggggggggggggtgggggggggggggggggggggggggggggggggggggggggggggggggggagggggggggggggggggggggggggggggggggggggggggggagctcaaggcgcgaatagcccgagcataggggaggggaaacaatatgtcggaaaggagaagataacatacactgatgctcgaattcaccggtgtttcgcgactggctctcaaactcctggcgcagttgatccaacaactccgtcagacgggagttgggagcgggtaccatcccgcgatgagcgttgtacatggtggaggataatttttttcttcctgtctttcacaagtcggagagggacgaaagcgacgttcggacggcaggtctaggtcagcgaataggatcgcaaccaagttttcgacctggactcaatgatcttgatcaccgaggcttcaatgcttggtggatagcaccacgcagctagccacagcgatagtgggcgatacggtataagctggaagatgagaatgggggtgtagcggtaagaggggtggaagaggctggcagctgacactttaaagcgggaaggtttgagtttggggggaaaggcggcaatggttgacgcgtgaagcgaggccatagccgagaagcgcagcgggtcttaccgtaggctactttttaaccttgtatataatactactcctataacaagaaagaaaatgctcaagcaaataacaattagatgagtacttttatacgatacagagatgaaccaaaagatctagttttagttttggatctaaagtacttttgtatagggctaaatacgttcatttatccatatctatgaggtccagatcgtgaggttcgcatgaaactggtattattccaaagatacctggaataccagggaatacttggatctacacccgccggtgcgggcagtggaggtacctctgagtacgggaagccgaagtggaactggtccatgcagtaccaatttagtactgcagctactgtatgtattgtaattttgacttatcatgtgttgattgcctgataagccacaaagtgtattcaggcatcaaggcatcaactgtggcaaaccaggggttcttttaaagtttcctctctttttcttagtacaacgcaggccatgaaggtatagttatgaagtgataggagtgaatttagaggattcgtatagaaactaatataaaataaactactatatactataactccatccactcataagataaccatatcattaacccgcatcagaccatcccccctggatcaattggcttattaagaaaaggtggcatcgcaacggctgtggcggttccgcgctggtatgactactttgttattcgctgcaaatctcctttttcttgttccttcaagtactcctcattcttccctgtctccctccccctcccctcaaccctatctgtgccctcaatcatggatatcattctcgaattatgggacacctttattggtgatcgcctctattcgacacttctccccgcctcgttatcttcgtccgtctcgttgccggcattcgtcaatgcggccgccaacacttcaatggccctttttggtccagaaccttttgtctatgaacaggctacacagatgatttacctggaaccttcgaaatatgcatacctgagtgcttggcccaggaacaacatttaccgtcaatttacaagcttttttctgatcacttggtaatgcgccaattctttcaaatcgctgctttttccgtgtcggtacaatgtactaacatccaattaggctgtttggactgctcgtctacttcttggttgcaacactttcattcatctttatctgggacaagacaacctacaaccaccccaaattcctcaagaaccagattggtctggaaatcagacaggccatggccgcaatgcccccaatgtccctgttgacagctcctttcttcgttcttgaggttcgcggatacgccaaactctacgacactaccgccgacgaacccttcccgtactacagtctcatccaaatcccattcttcatctgctttaccgatttcttcatctactggattcaccgcggcttgcaccacccccgtgtctacaaaaccctgcacaagcctcaccacaaatggatcatgccaagcccttatgcttcacacgccttccacccgctcgatggttggtcccaaagtgttccgtaccacgtcttccccttcatattccccctgcagaagatcgcctacgtcttcctgttcggcttcatcaatctctggaccgtcttcattcatgacggcgagtacgtcgccaacagccccatcgtgaacggtgctgcctgccacaccatgcaccacttgtacttcaactacaactacggacagtttaccaccctatgggaccgcctaggtggcagctaccgcaagcccaacgaggagcttttccgcagagagacaaagatgggcgataaggagtggaagcgccaagccaaggagatggagtcgatcctcaaggatgtcgagggcgaagacgatcgcagctactcctccgaaaaaaagaagaatctttaaaacgacggcgctaaatcacattctttacgacttcacaatgcttacttggttctagactacagggatcaatcgagggccactacagacttttcggtagacgagctgtattcttcacctgtgttttgggttgggaattttggatctccccgttggttttcgtgccatttttacgctaattcaagtacattaattcgccttttgcatctcttatgtgttttaatactcccaaaactgaccagcactcttggcttgctggtccacgggtagtctaccctattctgtatataatgttcctttttcttcttttcttctttcttttttccatgggtgatacaaatgcacttgtttagttctctctgtgcatccttctacgtgttcgcaaatttatgtgatattattaagaccgaaacagattcgtatgtatgatacttttataaacaagaaataccagaccagttcaaagttacataattggaattaatattgggaatcataatatacaacttccgtctccatcaagtactccagaccctggtcttcccgagacaaacagtatgattgctgccacctgcgcaggccttttgatgatggtctgacataggggaaaaggctcctctcctctgatggatcgagaatgatgggcacgtgcgctaccggagagttcgtatgatgacacctcgtgatccgtcagtctcatgaaacccattatcagccagatcctgctctcggctcggccagacctccgccctggactgcccagattcagccgaagcaagtcgcttgtgaagagcaaccactcgattagcctggtgagaatccccacactccagcaccgtgagcttggccttcaacttcaatgccagggtaagaatgcggtggtagaagatatcctcgggcatgcagtcttccatcccggagcccaagtatggaggcacaagtgccagcttgggctcaaagcgccgtacactgcgtgcagtggtaccgttgcggaagtccgtttgggatatgtagggcgggttggagatcaatagatcacattcactttcttggtcgggtgatgagatgtccaatgctccgagattggggtgttgtgtttggagcattgactcgatggacgggactgaattgtcactgttatgtccgaggacatcggcgcgatagaagtgtatgtctgtccctgcacggggtgccaactggcctagttgcaggttatgctcgagattctctcgggctaggtctaaggccgtaggactgatatccactcctgttatctctagctcctggaaatgaggacaaagtaaggcgtgcaagagaagtggtatgcaacctgttccagtgcaaaggtcaatgacacgcaaaggtctcgcctgattaggagacttggacttgtcattatggcccagggccatttgacggaccaagttggctgcttggtacgtatacgattcagtttctggcctatgaatgcttgtcagtaagagtatcgatttttaaagaatctgataggcagaccttgggatcaaaacacctcttcggcaaagaatctccaagtcgccgaatggttgatctccaagaatatattggagaggatatcctctagatcgcatgcgacacatagatctcaatcggcttctccatcctgcctttgatggaagagactggctatcgcgaactgcccgctcgcgtagccaacgaagctcattgcgagccgaatcgattgtgcgacattctttaaggagtataggcagaagattattttcccgttgggcttttataatgacagaaaaggggattcggggcattctgggaattcgaggaggtggtcagtcggggaacgttggtgccaagggatgcctatgccaagatatttacaaatttatatacaaattcatagagatctatgagatttaagactaaggattgtaaatatacgtcagttaaccataccagttttggtcatttacattagagaaggactcagttgcttttgctttgatggcttcttcatccctagggatgtggtccttaggatggcgttaggctattgttgatctgcgtggtcgaagggtgtcattgtgaatgtgcagagaattcactttctatatattgatagatatgtaaacaagtgagtaaatgatgaagaagatatctcacacatctagaaggccttcatgtccatacgcgtcaggactcagcagcccctaggctagtctgaagagagctgggagaagtgaatatagctgtaaggatatgtatacagacagttttccacatgcacatagctatattagatcaaaaataggtgctttctatttcataacacgtaagaactcgataattgagagtacggacaataattttaggtatagcctttccaaaccccaaatacaccatattatgcgagacatctacataagaagaaaattaactgatcagccaaatgaaccctagcggttttagaaagccagaagagctcccacgccgacaaggccgacagccatgtgtttcggcatagcggtcgccataggaatggccatattcccagtgacagaggaggtgccggaaagtccggtctctccctgcggtgctccgattcgagcagcggtgccaccaaccgacgcggtagtcactgggttcgatactgcagttgcaccagggacggaatcagtgccagtcccgatttccaaaacatcattctcggtggtgttgaagttggtgttggcgagggagatctcattattggcgagatcgtataccacatatgcgctgcgaaggaaggtatctcccaggactgccgtgctggtccccgcaggaacaataccgaaaacgcaggcccgtttgccgttccggaaatagagatcgccaacatcgatgatcatctctttgatttccacactgatcgtcggggatgagaatgtgtaaccgagggtgatgttcttatctgccatgctgcattcaacatagccaatgccactgtccgactcgtaggagacactgagatcattgtagatatcctgaaccagggcgtccggaaggtatgtaagagagcttcccgaatccagcaacacgcccgcaggaagggcactggaagaataggtatttttgccggatgaattggtgagggaaagtccagtgagcgcaatgatgaactccgaatactgtccgttgaccttctggacgggaactgtttgcagggtgccgtggtatttcttagtgttgactccaccaaacaaaatcgagcctgtactcgcatccagatcgttcagccagagactgtaggcatttgattggattactcctttgctgaccattgccttgggcaggttggcataagccgagtctccatttctgccaacctgaacttcattcgtagtatatcctatacccagcacaccctctgtatacagacatccatgttagctctgtggtaatcagcgttatatccgacagaaatcactcacccgaagagccagaggtaaacccaaggccaaactggaagtctttaatagttgtgcctccaatggtaagggtgtcggtgacatagtctccggcggcgccggatccatcggcataggtgatattgaagtccgagttcacgaatgaatatgaagaggaagagctcgagttgtaagtaccagattcagcgcaggcgtctttgctggctgcacagagagtcgaattcggcgtattgcaccacaaatcactacttccagtgtcgagaaccaggcgtacactctgctccggggtacccagggtaatattacagaagtataaagtttcctaggcagacacattagcagctgcgtaagaattatatataccaataaatagatatataaatagatatcatgtgtacctcattgtccaatgcctgactgacggtcgaacgtttcctccttgcttgatctctagcgacggggtcgagaatatcctttcgttgaatatccatttgcaccacggcggggttatctcttcgatggagggttaaaccccagactggcagcgccaggccggtgaccaataagacccaagcatttttcatgatagcgtcgatcgtcctccccgtattccgcaagtaagggatgagctattcgattttttgaacttcagagatgacgtcctaggtgggggtggttttgaatagagtagcaagtcaagaggaaagttgaagcaaaagagaggtaaagagggaaaaaaagaagaaacgggggggaagttgatatctttccacaaatgactatggagctacctagtcggctccagccggattctcaggtggatcatacgtacaatagatgtattttatatatttatatctttcctgttcttctcgaagatgaacgggtcaggcgggaactctatagtgctgtcgtcaccaagcataagtacaacgtaagtgtaaacgactttgtatacatatatatgtagttgatctaacatctaacataaaccaagtctttaacctttgattcctaaattcaacaaatcatgactttgtacttttcagcgtacgtacgcgatatacgtggtggaggcgatgacgcggtggactccactttcagccccctttgggctctaacggacatgactctaatacttacatattgtacatctcactaccttcattatatattgtaaagtcgaaaccgcctactcgccacttacagacccatcgcatcccggatttgctgcatggtcatccgactattggcccgcgctgcttcggcgccctcctcagccaccgactccaagtaccctgtctgatcatccatgatcgtaatataccgatctcggatttcttgcagatgatggatgattcgatctgcaacgtgttccttgaatgatcgaagacttgcgttgtggaactcagccgcaatatcctcgcaagatacaccctccaggtggcttaggatttcgatgagattagacaccccaggccgacagatcgggtcgtaggtgatgcttgcctccgagtccgtcagggctaccttgactttcttgcggatctcggccggtgagtcggtaagaatgatccgggatttcccatcggcgtgcgatttggacatctttgacgtgggttccttaagggacatcactcgctttgcgggggctggtcaagttaatgtttcgttctgttcgttctgttcattcttccttcgggtaactgttatcttacatatcaatgcctctggtatagggaagatgggcccatagaggtggttgaagctattcgcagtgtatctggaaaactccaggtgctgtctttggtcttctccaaccggaacatgagtcgctcttaatgatcattagcaaagaacggccaatgtagacgagaaacatacttgtgcaaaagaatatcggctgcttgtagtactggataggagaaaagaccaagtcgaagctgtgcccgtgccgttgaatcatcaagggtggcgtcgtctggcagctgtagcttactctggagagtgtcaataagatgctctttctgtataaattacagggccgctcaccttccactgtgtcatacgcgacagataccccatggaagccaccgtgctgagaatccacatcaactcggtatgtgctggcacctgatgaatgtcaatatgaaatcccgattgtccctagcagccgacagctataagacgagaacctaccccggactggtagaatattgtagagcgcttaggatcaaggcccacagcaagcaatgttgcaaaggcctccttcctccatttcttcaattgggctgggtcttgtggtaccgtcaatgcatgcaaatcaacaatagagaaaaacagcttggttccttcggttgcatcttgttggagcttcacccattgatgcaaagctcctagataattgcccaaatgaggcacaccagttggttggatcccagaaaatataacgggctcttgtgctggcggcgtaatgcttgagctgttccatcgatggcatctccttggaagaagagagagcccgcttggacggatatagagatgttttgcacgcaatggcctcggcgaggcaaattcatgacgcatcgcgttagcagacatctccaacaaacgctaaatcggtgcgagaatggaaagttttaggtgcaattgcttcggactgccgtagtccccaataaccaccgaaaaacgcgaaacgcgagatttatcacgtgatcaacatcgtacaatgactcgtaatattcaaatttcgcacatttgcagaatatgcgagcagtaacacgtctattggggatcagttgtggcgagtaacattcagtatatagaaactttctttcatctgggcttaaatgagaatagtaaaacagtaaaatacatatggcctagatcaagaaggcttttgaatataatggaaacagcgcctgcagcaaagacagcaagtccggatgttcacgggtatacaagttcaacagtagatcgccattccatctatagacgcttgcgctcggcgaatcgctcattgttcaaagtatcgaatatcgtgcccgggcccgagttgtccttccgctgaccgaattgcgcgagctcgggacgaagagcttcttccacctcggcaacagaagcgtccatggccttaccagcatctagtatagagtattagtactctgctcatagaagacaccagccaggcgaaaaaggaaagaaaaaaagtgtaacccataccgagactgtcatgttcccagacgtttgccttcatacccactccataaaacgcatgcttccggaggaatgcaagccatgcctgcaccgcttgtgggtttccatccttgatctgaaccagtcgacggagggtgattcgttcaaagttctcctggctctttttgtgcacgaagttacttcggggtacggtccagcgttcgacgatgcgagggagaggcacaggcccggacacaggaagattgaggtagtacgcggcacggatggcaaaatccgtgaagaactccacgttacggacgctgtatgatcgcaattgaaggtcgcagactgggaggccgtactccaccttcctccgcaaaggccttaggtatatggcttgcacgctgcgtggaagtcggttctcctcaccgaatgctcctaaccgttcagacctaaccgaactgtgagcagtgatctttgatctatttcgactctgagccaattgccttggatactgaccattctttcaccttaggctcggtaatttgctcggcttccatcggtctgcaatgtctcaattagcaacaaagccgaatcatcctagatttgaagggtatcttacgctactggagcaatcgatgcaggggcggtagcggcgggggtagcggcgggagtcgcgacgggcgtagcgtcaggtgtagcggcaggtgttggggtcacaggggcagcttctgcaggagcagctgcggcaggtgtcgatgttgggtcttgaacgggtgtcttctcttgctccggcggagttggttgggttggggatgatagagagcggaatggcacaggcaccttccaaggagctgttagcgtcgaaattgtgagttaaacaaaatgagaacataccctgaggcgcgtgctcactccaattaaggagcgcgatgtgtatgagaacattgttaatcgtgattttgaggaagatccgttgttgttagcggatgggttttttcggcgagcgagtccagggcggtgagtggggaacttggggatatagagaagggaccgagacgactgtctccaacggacggtgataactatatctcctcagtttaaatataattaggtcaatgataatccatacgaactagtgtatcatcttttgccgttattatataaatacgtcaattgtataatagtataactgaggttgtgcaaccaattccccatgttaccgtatatagttatagatgtgttctcttgtaggtgatcatctctcttctgacttttagataggatgttccattcaatgggctcaatattagtacatttgacatggctaatgtagtaagtatcccccgaggctgcttatctcgaatcctctccagtatgaatccgatcattggcacccccgccaaactagcgacctgggcaatggaaccatgtgactccgcacttggaaacatcgctttctttcgctcatccgatttctcactttgtatatattctacttctttggcggtttacgacactgaattctgcaaaaatgacaaagatagacctatcctcgttccagcgggcaaacgaagcggttttttatctcagagccaagttgccagagaccttgcaaaggcctcaggtcgcaattgtatgtggctcaggactaggagggcttgcagataccattcaacccgagtcacggattgaattcgactatgcatccatccctcatttccctcgctcaacaggtcggtcacgttcttcgtccttagggaagagtttctaacattccgcagtcgttggtcacgctggaaagctggttttcggtcttctcggccaaaaaatccctgcggtgttgatggttggccgtgcccagtcagcttaagccctcattctgcttgtaatatcacaactgaccttggaatagttactacgaggggcactcgattgatcaggtggcattcccaattcgagtgttcaagcggttgcaagtggatacggttgtctgtatgttctacattacccttaataatatgaagattgatgttacagaaaaacgagaattaatgttgtttggtagtgaccaatgcggccggaggtttgaactctgagtatgctgtgggggatattgttctattgaatgatgtaagagaaaccgtcaaatcctttgagcggagttattctaacactgggttacagcatatattcctcgcaggtttggcaggaactcatccattgagaggacccaatgaagaagaatttggagtgcggttcccacccctgtctgacgcctatgaccttgatctccgtcgccatgtgcatcagtcatggaagaaagtcatatcaccggaaagcaagagaaagttgcacgagggtgtatatgcattttgcggaggtcccacgtaagtcgacacaacacaatttcttttgaatcttattctgatagcacccaagttacgagacaagagccgagagccgcatgcttcgaatgcttggtgccgacgtggttggaatgtccacagtaccagagattgtcactgccagacattgtggtctacgagtgcttgcattcagtttagtcactaacaaggccgtcttgtctcctgtgcctcggggagatgataatttgcttcagaataaagcagcaggagaactgagcgctcttctggaagagggcatggcaggacacgaagaggttcttgaagctggccgcgcggcagccattgacatgcaggtaagatcgttgcatcaatccttggaagacgatgaaattgacatcgatccagaaactggttgtcgaaacccttgtagatgtctttgatcaagtgtaagactgggcttgacacggatgaatgcatatgatgatctcagaccgtgacgacctgggtccaacttattaggactctagcagagacaatttcgtcgtgtccgccacggccaacatggtgttgttgttgttgttgccattcaaggcataattgacaaaagtagataccgaaatctcacttgtttttccgggttctctttgccttcaggtccttgtagaaggacttctttccacttgatttgctggcttgaatgtccctatatttagattcaaagcgcttggtgccacgctcgagtgccaatgtttcatcaacgaaattcttcttgcggtccttcttggtgatacggttgctgaagaactctgtagggccctcgatgatggttccgacctgggaatattctggtggtttggccttgccattttccttcttgtagtgacgcttgggatcaagcacagaacgcatccgaatgagctgtagatctctcttaagctctggggtcatttctgtctttgggaggttgaaccactcaggtccagcagtaggcttgtcctatcaaggtgagggttgttagcaaatagctacaaatgtcgcacaccgagaaaatatagtaattgtgatgaatgctcagagtaactatgaataaaaggctctcattggtgcagcacagcccaagacggactggttacgctgcatcaagcgcttcgcgttgggaatattttcctcatagcaaaaaaaaaaaaggaaaggagagtaagcaaggacgagattgactcacggtgttcgctttcttgatctcaacagtgcgaagagaattagccaactccttctgcttttggtcggtgatctttgcagcatcgacagtagcaacatcatctccctggacaatatatgattccagcgaggacccaggtgacaatttcgggatcctaggaggaggtaagcctagatcctagcacattgatcttcaacatgtttccatacctaagagatgccagatcatcaatctgggtgcttggcgcattgaggccctttagtcgagtctctgcctctagaagcaactgctgaatctgatcatcggtcaggtcttcctgaacatccgacacaaatgttgagtcagccatccctggtgaatagggaggacaaaggctcaagaggtttaaggtgagtggagagaatttatatttttttcttaggtttgcttgctgcttcccggggccggacaaacgtttatgagaaatttctgcttagtgcgaaagtggagttggtatcatgtgacagaactacttctttccaaggtacagttacaagtacataagccgtttccgagcgaagggtcaagtactgttacttatgcgcgttgtactccccgaatagtacagctcatgtattgaaacgttcacctatcagagctatttgtctaaatattcttcccagctctggagattatatacattgcaataaagtaaaacaatgctttacaacaattgaactattttaaattagacctgattagatgcaataagaaacccatattactatcttggatataaaccccccatatcacatccatacattgtataggtattatacaacatcgagctcggaggggtggccccgaggaacgtcagacagctgaacacctctagcttagcacccaacgcgccttgacctggaacacaacaagcttcatatagtctgtgactgtaacactcatccgattatcgattttatatcgcgttcattcgttctttgttcttagatcctccaccccgcctcgccgtatctcacacctggtcgcgtcgcatcctctcggtaccgcccgatacaccccagagtcccatatagctcaaccccaaagcaagcatggagcaatctcctcaaggctctgcgcagcagggcagacaacagccgcagccgatttatgatgttagaaatgggggtcattatggtaagttccaagtttgtcaatgcgctaaagctacgcgccaaaacctggtttagtcgctacctctcggctacacaatcgattcaaatggaagctgacaacatccatcatttataggtgctagcgcagcggtatgtccatcgcggtgagccacgcgggtcttaccaccttcactctacgatgatcatgcggaatgtcttgagtagcaactaatcaagttgggtaaaaatagctctcagcgcaaggttatgcgccagtcgccgagttgtacactggtacctgggccaacgtaagctcctgagatgaccagacaaatatcgagctctgatactcacctgaactaggtaaaccaaggccttcaaggaactgcacgtgatatcttgacgacctactggcaacatgtcatcaaccatctggagtcagacaaccatgactacaaaatccaccagttgccattggcccgtatcaagaaggtgatgaaggcggacccggaggtcaagatgatctctgcagaggcgcccatcttatttgctaagggttgtgatatttttatcaccgagctgactatgcgtgcctggattcacgccgaggacaataagcgtcgtaccctccagcgatccgatattgctgccgctctgtccaaatccgacatgtttgacttcctgattgatatagttccccgcgaagaggcgacctctcatgccaagcggtcgagccaggctgccggtaccgccccaggaccttctgctgcccccggtcagcttccccctgccccgcatggggttcaacagcaccaacatatgggccctgccgactatgcccttggccagcacggtttgcctcaggaacaggagtaccgcccgcaacctggcatgtatcccggagctgttcaagacccaggtgcggcatatggtcagcctcaatcccaaatgttcgaggggatgtacgcctacccgcatctccctccccagcaggtacgtagttgtatatctcatcttcagcagacaaaactaattatgattgtcaagtgaacctgatatcagccaatggtctagtccgtcatttcaatttagttcatacgcgtttcaaggcgagttttggtctattttctttttttattgttcttatttgattcttctattgttatattttcccacgcacggcaatgacaacgctgtagagtggtgattgagcgaccctgatatttctgatatttctgatgtctcgggattattttatatgcggagttttgatcctggccagaaaagaagaaaccacatgtgacattctgactgttgtgtgtgacttactttgttgattgttagcagtatcatgtatattcctacatcttgtgcaataaatcaaatctacctctcttgcaggttttggagtaagccgaggttacaatctgagagacaagagacatcctcagtatatggtaggtatgcttctagctgtatttctggattcccaagaggtacttcatggttgtagtgaaacattgcattacccacaacacaccatggattcatccagtcttcttgaagcgggatgaaagagtcgcaaacttatccaccttagtaggggcttgaacactccgtgtaagcctattcacaaacagttagtaggtagttcatagcaatgagatatactttcgaatcgtacttttcaagcaaaatgggcccttgcatggcatcgacgcgtccatatttcttgttcctcgtggaaatgtcataaaactcatctgcgctgtccgcttgcatcaactgtacggtttgctgtaactcgtcgaggttctcgcgaagaattgggacatttaagctatccacaaattcggcaagatattcaacatcttttgccaatgctgcaactccgttggggttgatttttttcacatctggggacagtggttgcgcctgtatgatctgtcagtaagtccctttttcaattcattggggttcatagaaaacccaccaaaatcatgttagcagcatggctaagggcatcaaagtagatgagctctttgatttccgtcggcaaacccaacaatgtggagttcatgatgttggacaaaaatcgagtcaaggtttgcatgtaattgctcggctctgtgggaggtgtagaagacatccactcatactctgctgtctcgataaggtcatcgattttggaattgactacctcgaagatacgcttctcagctgccttcttgttgcttttaaacttttcagtagccctcaacgcgattgaggtgccggtggaattctgtgatcgggctgctgccaataagagttccagctcgcggcaagctagctcgaagtgttccagattaataagaatctgaacgatttggcctagatattgtgaggaaagacgctctactaaagtatcacagactttttgtgaaaggaggtcatccagatcctgctacattagtagtcgagtcacgggtcttgggtgtgttggttcgagctcacattcttcagtgtctcatcaatcacatttgtatttgcgaaaccatcatttgcgaagaaatagaactggttcaggaaattgcggatgtcaatgcaacacagaggatacattcgggaaaatggtaggatgcatgggaatctaagccaatgatcagttagatctgaataaggatcaactggcctaggctgattcacaacttacacttgctcctcacgtggttgttcggggttgtaccagctgacgttgaggaccttgtcatgctcctcttgggtctgtatgggcatgggcatataatcatccgttgatacaatctggcagtgtcagaatttaaaatagatcgatggaagggaaacagccctacctcctggaaatcatcactgaatctcttcttcagaagttcggcatatttgccaaagagtgtcagcaagaagtcatcaaagacccgcacggggaagttccacgtctattatatagtcagctatttcagcccaagccaatagagatgggcttgcctacattcatcgtctgcatgaacagagcaatcagattcttgatgttgagaatgctctcagcgttgtcaacttcatgaagtgctttcgatattaacactacagccgcttggcacatcgagtcccacagctcatcaatctatttagcataggtcagataattcctagaaggtccctccttgaaaagaggctaaatgaaaaaaggatatggcttcttacgtcgacagatgacctgagatcgggggctcttttcattgtggcccgttcgacaatggcaaatccagccatctcttccaagagattgtgcagactagaaccatcttcatcaacaagggtgatggaagacggaagcaagagctccttttgtcttcgacgggtggtcgcgtattcaattcggaatttatccatatgtcccaaagattgatggatatgcaagcactcgaacagcggtgtgaagtcgacttgcaggtcttcattctggagcaggtcatactcttcatcttcatcagacaccagttcgatcgcagagttcaaattgaagtgttccagataagggattttttgcgctctttgtttttgtcttgttttccgctggtctgtgtggaaaagcgcaatttccccgaggtattgagacatttctcggatgcggtaaagccaggtgttgagatctgacatcactgcttccgcaatggccctctgtgtcgctggaactgagcgttgtatcatgactgcaatcttgtattgtgtcacccccttcagatggacattttgcaattcctccagcgcccgcagcgctgcatagtggttcttctttgccaagaggtcatggacttggttggctagacgcaatacctccaaacaatcctgaatggcgcgactggtctcatcgatgttctgtcggtggccacgcgactcgactagtgctttcttctgctcggctagacgttcggtactggtttgaatagactgattcaagtccagaatttctcctgtcaagcttactgtcccctctctaatccgaaggagtgaattgacagatgagacaaactcctggtgatttgtgttgcatatactttcgatctcggactccttgtcgcccgcgaaccgggacagtgactgcaggagttgtggagtgcggttcccaacactgtagtctctgattgagggaatgagctggtccagatagtctgtgtcagagggtgagataataatctatagggacaagaagtcagtttcgtttaggtacattctccatgttgtagaggctggctcacttggttcaagacatgtggctcattgagcattggagccatgggtggcataatggctcagcttcatagccagcgataagcccaatagtctcaatacttctccacttgcagcttgcaaccttacatgtatccagggatgatctcaagcttatgttactcgttgacgtccgtaggcggtcaaatgttcgatctgccgctttctaaaaggctaatcccactctgtactagcgttatcactagcctgaaccttagccatatcaagtgtataacaatcttccttttccttccttttcctttttctatatgccatggtctctttgttctttagcattgttctaccacaatttgctcaatattcttagcagccgagagactatgggaccaacgcatctgataaccaccttatttacaaagtaagacagagagcagtgatctcccacactgttgacaagcgacatgaaacttctcattgagaaagatatgaattggatgattgtgatttactatctatggctggtctgtaattgtgaacaagattttttactatgatagtatcgctgatgaaggatcacagcgagtcattccacgggccttgtatgaagattggagacactgcgatagtgaaggctactagagaaccagcaagataaaggacgactcgtgcgctcaactaggctatattttactttcattgggggccaatcattgaattcttgttgggacttcgttcgttcgtcgttcgttgggatctattcagcaatatcttggtcgcactttgtgagtcgttctgctgcgctgtggtcgaactcaatgagtcgctctgtcgcggtatcttgttcgcacgcaatgagtcgctctgccgttgcacaatcacatcgtcccattggttctctcgaaacgtatcccgagtatgagtcgcggtcttgacatataaaagaactgtgcccaccaacgattcctctcttctcttttatttcccgtggctcttttttttaaaaataatcttgctgccatttactgctactttctatcactagggtcacactgccctttcctcgctgcttggactgaacaacttgctagcttgtatgtctacatgtctttctaatatgactctcgattcctgaccttctcattgatttagtattgaacatggaagggtcttctccaactcgaggatcgccatcgaagcagcttactgcattcaatccgatggggtatgatgctttcgctcaccgagccaaccctggctcccttcctggaatggcgaccattcgtccgactaggtaggatacttgtcctggttttatatattgatgatccaagccctaagtacgttaatgtgttatagtgatccatttgctggttggatcgatgagaaagggtctgcgcctagcatcccttcgtctcaaactaccactgcaagctctgcttcttgctatgcctatccagtgcctgctaccactgaccatgcgaacactcgcatctcaggcaacgagtacaagtactcgcctgtttcgcctcgggtgacttgcacccaggcagctcgcgcgtcaattggcaaattccagccctcgcctgtctcaccccaggtgtcccctgcaggagctggtcccggtggaatgctatactcgccttcccatgcccaggcatctcggtcactgaatcaaactcaatactcgcctcattcgttgactcgcgctcaggcgcgtttggcatctgagtactctcctgttcaggcaggtattgccaatgttcggtactcaccatcccgtgacgacattaactatgaatacaatacgacaccggattttttatctagattgctcgcagccgctgattctgcagtcggagataccaatgttgcctcccctaccaatgcactggcccatatctcccccagtaaccaagctcgtcgtgccactggtacaaccgacgcgtctccacgatctcccgccgctgggactaatgatgttgttgagaaacatcgcagctttattgtgcagcatgtccctctcgacaccccccaccgctctattgctatgatgttcccggtaagttacaatatgatctcatgggatggaccaaagctgactttaacaagatcgaggaatatccttcccttgagactgtttgtctcaagcaccttgaggctaggggcgtcttttctttttcgtttggcgatcttcgggaggctgtccacgccatgaacaaaatccgcctaactcgtcctagctggcgcgtcttcccggccagttacgacgacattgccactttcaatggatccaatggatccaatggagccgtttcctctgtctctgtgcctcagggtggtgcatttctgctttctgtgtacaccatcccaagcaagtggctcgtggaacccgtggaagagattgtcaaccaagtcgtcgcttcccttggcaccctgcgctcttgcaagcttaccgagaatggaacgagcatgagtcgataccaagtcgaatatttcaacaagcgtcatgcagcttatgctttttcctgcctcggtgggttcaggcttgatgtatgttgttcctttttttcctttttcacttgcttttgtgttctttgaaatgctaatattgggtttctgcagagtcttcatttcaatgtttctattgatgcacgtgaagaggttcctgttttgcctcgctatcgaactgccagctttggctcccctcggagccctgtgacaccgtaccacctcgtgtccaaggagaacgagatcgacgagaaggttgacatctctccagtttctgatgaaggtcagacgagtggagagcatgctattgaccttgaccgaatcaaacaaggactagatgttcgcagcaccgtaagtcttctcccctctgctgcaagaccggtttctcacattttgtctcgttacaggttatgatacgcaacattcccaacaaaatcacttcggtatgattatctccgttatcttatgaaaatcaggaaggctaattctatcattcaataggaccagttgaagaccatcctagacgagtccagtcatgggaagtatgacttcctctacctgcgcatgggtaagtgcttctccatggtttattgtcttgttcatgctaattcgacccacagattttacccatcattgcaagtaagttctgattgcttgataattgttggcttccaattttacttaccatttgtccttctagcgttggttatgcgttcatgaatttcgctgatgtgagtattttttgctggccttactttcgtcaggcatccttttcatctgatgtctcttttttctgacattatactaacataatttacaggcaattgacattgtcaatgtgagttataccatgtatcagtgtgtgacatctacttaccaattttccttagctcgtacacgctcgagagggcaaggcttggtatgctgcttcctatcttcccccaaaaagtgcattttcgctgactcgagacaattacaggcccgactgcatctccgagaagatagctcaagtttcttacgccagtttgtgtcccatccatagtcagtgggaatgatatctaacaagtttcaatagcacttcaaggtagggaagctcttgtgaataagttccgaaacagcaacgttatgacccgtcctcatgaagagcgaccccgagtaggtttaagctttcacctcccccccccccccccccccgcccccccccccgcccctccnnnnnnnnnnnnnnnnnnnnnnnnnnnnnnnnnnnnnnnnnnnnnnnnnnnnnnnnnnnnnnnnnnnnnnnnnnnnnnnnnnnnnnnnnnnnnnnnnnnnnnnnnnnnnnnnnnnnnnnnnnnnnnnnnnnnnnnnnnnnnnnnnnnnnnnnncatgaagagcgaccccgaggaagtttaagctttcccctccccccccctccccccccctccccgattccggtgccggtattgactgaatatagctcttccatgtcgatggcccccgtgcaggcaccgaagcgactttccccggccccaatgatgccagtaagctccgtcgttcggttgccagcaccactcagcaaggtaagatattgtgccctttggcttgtggacgtattctgaccctttcacaggcctctattcaccccggaaacgagctcccagtacacctcgctccaaccgcacgcgtcctcagtctggatccttcaaccagactcctcggtcccagcccttgaaccagactcctcggagtcgaccatcgtcgatccgcactccccggcagtctggcggacgctcggtccagcatggtcctggcgagttttctccgatgaagtcatctccgttgaaggcagaggaccgtcaattcaagccggagaaaaattaagctcctcctacaggggctatgcgaacgggtcatactgcagcaactggacatgacattctgtaagccaatggttcctgaccgatcagattgtttcatacttacacaatgacaggcacagagtctcgcgaccgctttgtttattgaattatccgacaaaatccaaaaaataacgaaaaaagaaacaaatccgacagatgatgctacactgacaattgcatcctcttccctctttgctccttcaacatcctcgattgttcctctacgccacgacagagggactcattcagaggcaacggcaaagggaagagttgctcagaatggctctgtgcaagccttgcctactcgctgtttcaaagctgagattgcacatttcgatggtctttcggaattgtgcctttaattgtgatctctcacgattcattgctcgagcttttttcccagcttttttccttttcatggcttctgcgtctgctttttattcttactctttctatttcgaaaatccgaaaatccaaaaacaggggatggagttagtcaaatgaaatgaatagttagttattgtctcccagtcacttacaaagtagacaggtaaaaccgtagaatccacgggaaaatcttttcatcttttccatctcaccaaccatggactccaaggaaattctggaagtccactcaatgctacatctgatctttcatcgcaacaagaatcaacatcgccgaacaaaatggtggaaatggctatccatcttgaaacgcgccactttggattccgcccgatcgggggtgaccactcatctggccacgcacgtaatcccaagatgttacatgtatgataaaaagaaaagtcctacgtggaaaaatcaagctaactgtattcttagcgctttctcaactgtcgttaccgataaccagttctcgacccttggaatcgtacttttagctgcgttggcccgactgtccaaagtcaccgggatcagtcaccagctgaagatgcaacctgtgacaaggtccaagattgctcctgtcaagaaagatcgggaagatcttggggaacgcattcgtcgcattgacaatacgccagtcaccccggtcaagatttcccagtctgatttcaaggtccccaaggcctccaaggtttctgagaagcccacggaaaggcctacagatgacgctgtttcaaaaagtacatcgaaaaagaagaagaagaagaacgctattgatgacttattcagcggtttattttgaatctcatacccctcttatgtacagtgttttcttttcttttgcggattccaagggatgtccaggcatgtattttgaagctaaaatgtttatgaagaatgacgagatcgcgatcgagagaaaataacctcgcccaataaattgacaccaacatgattggcagtggcccacgccatactgtagagatacttgggcgagaaaacggtccagatgaaaagatgcgtccggagggctgtacaggcggccatgacagaaaccaaggacacggcaacatggaatgtcaacagtgccgaggggtcttgtcctacgggactcttcggccggagacgatggctttgtgatgcccaccagataggccctgcccagttgctcgcaaaggtgagaactcccaccaacaccacgctgtagctgtcaacaccgttatatccactagcaaggtctacagaggagattgcattggatccgccaaacgcgaagaacgtcatatattggaagatcaaggttgtgattgtcacctcaatccctgtgaggttcatggaagagagaatgccggcctggattcggaaaatcaggaacagggggacgttagtggcacgggactgcgtcattaggaagatgtgcagagcttcatggattgtatcatatggtactacagagtctggtcagtaatgacctccaagctcagaggcaatctagcgcatgtgtgggcttacctcgggggactcttgatcgttttccggcaaagagcgatagtaggacaacgacagcaagtccgtaaaacacgagcctggcatgcaagaccaatgatagactgtagggccattccttcatgatttgcgagatgaatgtcccatcaaggagttcgggcgattccgaagtcacaaagtgcaatttgaacgtaaaggccaacgcggagggggccaagacacctagcctcaataatccagggattggtatactcccgagaagatgacgaccggcatccacgtacgcgaggataaaaagaccccagaagatttccgggtggcgtgcaaagaatgtgcgagcaatatcaggctcggccgcgaatttctgaccagtttggttccatcgtcgcaagagccgctgggtgatggcgagcacaagaatgatacatttgtcagaccaatataataataatccagagcgtttgtgtgagagcggctttgcagacgattgcgatttcatgtgcaggtagacaatccaccccgagcagatccaataccagaactgctgctcttcttccacatagctactagcaaacatcatcatcccacaggtgatgatcataagcgtcaaaaacatcccggaagatccgtgacgtgtgcattccttgtatgtggccggaaggacaagcaggcctgcaatccccgtgatcaacaagcccagaatgagtctggagacatcgtagttactggcagtacgactcataacttcctgtgcaatccttaaaaattgcagcaaatcggggccagctgtagagtaagaatcatctgcttcatccctacctgagagaagttgctggactcgagcccacgcacattgagctccctcaatacctgatggaagtcctggagcacaggatgtaggactatcggggccaaacgtagatccagggaatgttgttgtcaacgtgttcagcagctgctcagcattttgatataagattcgaagtttatgagaacctgttcccgagtcagttccggatctttcttcgcttggacgccattaggaatagattacataccatgatcccacatctctaaaaattctgggatgaataccccaagactgtttaaaggaattgggataccaagaagccccgccaaggtcggagcaatgtccgcctgctcaaccgtttggtagtactgcatatcacccgacggttccactgggctttctcttcggccacccaaggcttcaaacttgggtgaaatgaaaagtaacgcgggggatgtttctccagcagatgacccgccatggtttccagcctcgttcatgccatgatctccgcacaacacgaaaagtgtggattgaagatgatcttgttgctgcattgcggtatagatttcagtcaccacagagtccatctcgtgctgtttcggtatcatgaatggactaggagagttagaggatagagagcagctaataatgaaatcgggagctgaatttaccttttggggccagccttatgtcctatgtgatcgagacctaggtaatgcattatcagagcagaccagtcatcctgggcaagctcgtgaggaacgtgtcgagtcacattatggtctacttccgtgaagtcctgcgaggagaatctcagtttcaatactaatactgcggatacacaaacacctaaagtacaactgaccgacacgaagaagcttgtagttccatcagctcggtcaaacattcccgggaagagcttgagccaggtatcatccccatacatcacaagccgtcctcctgtagccttcaattgtgccaaccaggtgtcctggtatgccagtgttgacgaggtatccgattctgcgatattgagaataacatctagaaaagatggaactgaaccagttgtgatagcttttaatcgaggcattgtgacagttggagcgcttgcataggcagtgaatggcaatgcagcaccggaccggatcaagctagtatccaatcagtcacttgtttcgaacgaataaatggtgtatttcaaaagcgacacccacctctgtgtaaacaagaaacccgactcgttcgaatatacaaagtcgctatatgtgagcaccttgttagttactgatatagctcggagttgaattattcaaatcatacctcctcagcgcatcaacaaccatgaagataactttatcaaaagccgcaggcactatgacattctggcctgtttcatcaaaagtcgctaatccagggatcaacggtttataagggaagaaccctgaagagaaggtgagtatgcccacgggcaccagcaaattggcaatgactgtcgtccaactgcggaagcccgccatttttgcaaattgacttgatgttagctctggcagaacaaattttatgtaaagagaccccgaatcagctgcacctgtcgaactgtccgggggatccaaagggaggcagaattatatttatgatcgtcgcgcatcaccacaccgccttctcgagtaccttgtacaacattaggtatagttattgtaataatactattgacattagttcaaagattcaacaatcattcaggggctagaacttaacagcgccggatgaatgcatgaactagccaactgatcttgactagggttgcttgtcggtgaattaagaattagatctacatcgaccctgctccagccacagtgtgctagggttgcttttcttccactgagcaaaatccaatatgtcaagctttgaatgaaaggtatggtatatcaggcacagactataaaacatatgtacgtgaattgcaggtgtaattgtagactcccaaacgcctttttcttctccgccaccacatctcgtcaaatccattcattgccctcactcggcacaggcctcacttcctcttaggtcccttcttggtcgtagatagacgcttttgaaagacaatcgagttgcggggcttctggttgcgcttttgcacacgtgccggcttcttcttagagctcttgattgcgtcgatatccatctctgtgttgggtaagcgttctgcagttcaaagcaaaaagtgaagattcaaatgctggattgtcatagactaaccttcactgtcaccagtctgagccttggctgcttcggctaatacggaatacgaagttagtcggtatccttagaagagggatggtagtatacataccagcctcgtccaggtccatctttgatttcacaggagcttcaggccgtggctgtgatgcaagctcctgtagtttggcagcgagtctctcggttctggcatcaaccagtgggccaaagaccttcttgcgcagattggctctgttgcgcttggaaacgctggctcgaacacttttcgccattgtatgaggatagaagaaaaggataatgggaaggataaggtaaatatggtatcaacacttgaggatatagaccaagacgtcggatgggaaataaaatagtcaactgataacacaatcaacttttttttcccccccgataggctcgtcttatgtcatccggagaccgcacttcccaaggtacacctccgaggctttgtcgacttgacctcacccttttatggctggggtttgtggcctttctctaacatttcactccagtcaagagatgtatcgatgcagaacccttacaattggcctggctgaatcggacccttgtctttcgaggaaccctgaaccaagtccaccttgattgctttcgcactcctcttatctgtgaagcagtcatgtcgaccagcctgtcgtcagaggtcgcgacactgacagcctttatcaagccccttacaaatccacaactgaaagatttgttgaggtatgagggcctccaggtatccgggttgaaggcaaccctacagtttcgcattatccaacgttcgtcaactctccctaactcttattatgacttgttcatttgatcttcaaatctctgcttcacatcccattcttgcagcgatccgtacattgaccgacgatataggaatccaatctctcgcagaatctgaccctgtcagtttcgatgctctagctcggcgcatccgtgctactgcttttccaaacaccgtgccgtatcaatcacccgctagaccacaataccagccaccgcctgtctctcaatctcctgcacaggctcgatccgcgccgctcggggtttccatgtcacctcactcatactctggtccgagtgctcctctcatgaaacctcctgcggccgctcataaatctccaggtcctttgattttcaaagaaagtccattttatacaatcctagagcctttgactgcagtcgtggaatgtaaaggtatgtcactatctatctgtgaagcttgttgagggtctatgtctaattttacctagtacgcgaacaaacgcgggatagtgttgaactgaaggtcatgctatctcagcaagttgcctataggctgcaaacggactcaaatcttcgagtgatggtttattgcgccggtgattcaggtctcacacaatacaccaagtcggatatcgcatttccacatcaagtggagctcaaagtcaatctcgatgaagtcaaagctaatctcagaggcctgaaaaataggccgggcaccacacaacctgcagatgtgaccaactggatccgtaaaaagccaaattatcctaataatattgtcatgacttacgcattgacgcaaaaggttgagcttgttccctttatactcgatagagcatctgttaggccggttgactaactcctgtttgcacagaaattcttcgcgcttgccaacctcgtgaagcagcatccgactgatgatcttgtctcgcagttgaagacacggaaactcatctcgaaggagcaagtcttgcgcgaaagtaagatcccctcctattcccttgggtcagactatgctaatttcgatcctcagtgcgaaatcgcgcaaatgactcggacattgtcgcgacctcaagtgtcatgtcacttaaatgccctttatctaccctccgcatccaagtaccctgccgctccattgtttgcacacacaaccaatgctttgatgcgtcttcattccttgaattgcaaaaacaagcaccaacttggacctgccctgtgtgttccaaatcaactagctttgagtctctccaagttgaccagtaagtctaaacccccttcctcggcatatctgtttcttttcctaactggtcgtataggtacgttgatgacatccttcagtcaacgtcaccagataccgaccaagtcatcgttgaacccgacggcgtatggtcaagccccactgattccgacgcgacgaaattgggagggatgactcccgcgtcagatgacgatgacgacttgatcgagatcagcgaaccagggatgcccgttgtaaaacaggaaccgggacccacgaccgtcgccctagaacgaacacctgcacagtcacagtcacgagaggcatccaccccgtcctccgcgatgcgcatgtccagcaaaaaacgacctattgctcaggtcatcgaccttactgaaagtggtgatgaagatgacgagtcccctcttccacctcctaaaaggccagctacaagtctgccatcccgggctttttctcgtcaggattaccatgtcccgcccgccagcagccctctgaatggcgggtcgtacccaccatgaatttcgattcttatcctagtcaatctgacgaccaaagccttgatcgtttctctttctgatgcatatttccatggagtttctggcggggtagggggggagtcttcaagatatcacaagtggctacgtatctaggagggattgattgtatcattctagttttgaccggtcaattagcctggaaatatatttgaccatcactcttattcttatttacaaataacacaatatatgtttcttaactattttctcgtatagatcaaaaggccaatatcaggtggattccggcctggggttagcttagactccccaacacccccccggaaatccccattttccagttctcatcaacacgccctcattctgtcagccgggtcccttattcattcgcctcttccttagatcctgtcacctttgactccataatgtcattcgattcaacttccccgtcaaatgccgatccaaatgcccgcgtcttcagctcctcatgcttcgacttcctactcatagaattggtgccaatggccgagcgtatggcaaaggaacttgcgacggagggacaggaagctgaagatgaagaagtgagagagacgatattctttcgtctagagtctctgggctatcgtgttggtcaaggccttgcggagcggtaagcataaacatctccttttgcagcccctttgcttttctcttgcagtcctacagcgcgctaaaccgtgtcgatctctatagcttcgcccgagatcgccctcgatttaccgataatctcgatgtgatcaagtttctctgcaaggatctgtggacggtcctattcaagaaacaggtggataatttgaaaacgaaccatcgggtatgtgcaatacagaaactgctgtgttggggagatgcgacataaacagcacttgcacggagatgtttaaactaatatcaataaatagggagtctacgttttgacagacagcgcgttccggccatttggtaggatgagcatggcggtgcggactgaagcaatatccatggcgcaggcagtaagcatcccctttgcaattaatgaggatttctcggcttatgggttgacctagtacctctggtttccttgcggtatcatccggggcgcgttagcgaatttgggtatcaacacgaccgtgcaggccgagacctcggatctaccaggtgcaactttccagatcaaaactctccagcctcggccttgaacatgaaaatggttgcgcctgggcctgggctagcccttttactcaaccaatttacgcctactcttatgacttatgacaattccattttaccaagaccttgtggttcctgcgatctactacaaggatcgttgatcgatcatcatctaagtcgattggctacgtgagacagaataccgaaaacacgcaaaaatgaacagtggaatctgaacccttgaaattgcaggttggttactatatctgtgtgtcaaacctacccatctgatttcgggccgtacactactcgtgtctgctcattgttcataaactcatggtctcacatttaaagcctatctttccgggagaagattgattagcaacgctctgccattttctagtgtcatcgcagccgtggagaaactagcgagaaatatatcgacacaaagaggcccacccgatatacatggtgcacaacggacattggggggagggaggtcttactttggtggggagttcttagcgaactcaatgcccttctcgatgttgccctggagtcccttgatgcaagcctcgaggagcttcttctcctgctcagtcacgccgtcaaggatgttaatggccttctcggcaccgttgggctagatcgagcattgtcagttagttgttttaacacattggaaaattgaagacttacaccgagttccacgggagtggagaagaagtcaagaccggtggccttggcaatctcatcaccgccagcaacaccgggcaggtagacgaaagtaggctcaacaatgcccttctcgcccttggaagccttgatgatagcctcggcgaatctaatatttgtcagtcaccgtggtagctccgggttagcaggtgaaacatacctgaaaccggcaaaggccatagacagagtagcggaaccagcaccatccttggccttgacgacctcgtcacctccgaattggacacctgtgaaatatcagtaaacgcctcccacggaaagggctgttcacatacgggtaacaagagcatcgtatcggtcagcagggatctggaagctgggggaaaccttgctgaacagaggaacaatggtctcgccagagtggccaccaataacgggaacggtggcatcagaggcattcttcacgccggagaactcctgagtgaaggtctcggcgcggacaacgtccagggtggtcacaccgaacagacgcttggggtcgaagacaccggcagccttgaggacctcggcggcgatggggactgtggagttcacagggttggagataacgaggatgaaagccttgggggcaaactcggcgatactctcgacgaggcccttcacaattccggcattgaccttgaaaagatcatcacgggtcataccaggtttgcctagatgttaccatatacgttagcaaaaacaccacatcccgatctgtggataatctactaacggggaatgccggcggggatgacaacgacgtcagcaccggtcagagcaagcttcaatccatcatccttggggaggtagccagtgattttctagtcaaattgttaacgggtttattatgatgcttcaggagtatacatatacgtacggcgaccgaggagatgtgagagagatcggcagccacaccgggggtgttgacaacgtcatagagggccaggtcatccacgagaggggaagccttcagcaagagggagagaggctagagggtcgattagctgaggttcataagaaaccctaggaaggataaatgaggtggggggacatacctggccaatgccaccagcagctccgagaacaactaataacgaatcagcaaatgatagacaaaacggctgaataacataccagccttgaccatgatgaattaaatgcgtgtatttgtagagaaagagaggaggagaggaagaagacaggagagaaatggggaagagagaagcttggagaggggaccggccgatttataagaggggcaagtgctgagaggggcaaccccggaatactggaagtgttgatgttcggagttcctaacatgtgaagtgatgaggtgacgatatgcacctttattcgacttgatttgcctttcgacttgattttgctcgctttgactatcttctactattttggactgtgtgagatctagtcctccaatcccccatgtcctctcatcgctctataaagaatggccaaggtaaaaagctatagacctttctccagactctccggcaattctcgtcccttgacctggacagttccacacttccccggggctaccgggttgttatatcgggaaaaggcggactataattctcatctacaaccggacattgtggctcggcccgaccagtcggttgtgaatcaattttacttcttcccttggctagtttctcttccgttccgattagcagtaggaatcgttctttccggggaggggtggggggagatgatttctctcgctttagaaggtctcagacaggacacagattttttttttgctgccctcggagcaagattgctagattacatggtttccaagttcagcatggcgttttacatacgcctgtcaagtctccttcccagatctcagatccttcatagtccacaattcagccttatctcgagaaaaccttactcggactcctcggccttgcgggccttggagccacggggcttctgggcaggagcatccttcttggggagctgcgagcggcggacggcgctcacacgggcgacggcctcctcgcgaagatcggcacggtagttgttcttagcggttctgtcggcaacacccttgtagatcctgtaaagcagataatgatcagcactggatcgtgaagaacaacacacaccatccatgtcttgaaaaacaaaggaatgaaaaataggagccgcttacttgcggttggcggtgctgggaccgtaggtgacagtgaccaagttctgagcgggctgctgggggttgctgggcttcttggtgatcacggcgacaccgttctcagtgggctggacaccgacggcctgaaggtaatataattagcgccacaaatctatcttatatatataacagggacaacatcagcagtatagaacttaattaccttggtgttggaataaccggcatactatagagcgccaaaagagaccgttgttagccatgcattcccggaaagaaacatccattccgtctaatccccgaggcccgtaccttgtaggagtgcttgttcagcaggttcagggggtcccgggagaactgggagccaccgccggagttgcggttaaccaggaaggagttctggttgcctattccaaagattgatgagctggagttcggtttccaaaagctttgacaaaaattcgaaatgaaaagttgcggagggttggacatacgggtgatctcccagaccaggtcgttggagatgtttgaggacattgtgatgagaggggatgttgagttggagaattgaaagatcgaaatcgctatcaaaaccgtcttcacgtcgatccaattgtgtgtcttgaatgccaagacctcggattggacgaagtctcgctaaggcggctactttaggaataggctgagtgccttggtgcctgatgccttgatacctgaatactgctgcctgtcaaacaaggcagaactaacaacttccggcgacctccaggctgccaataatatgaacgcgatgctgacgttgccccctccaaactctactttctagtgatctcctatgccttcttcatcgacggcttattgcctgatggaacacatcatcttttagtccttctttggcaaagaactctcgagaggcgccaacttctccttacaccgcaatatactactactccgtacacgcccgaatcttcaccggtatcactcatcatcatgacctacattctcttttatttcctactcttttcggttatcatcagcgggacaggtaggtcaagtgtctttccaacccgggaggaaacaaagcaatcattctcaacggatgtggttctaattacactgtagccttatacctcactcggtcacgatggatgccgttaatccaagtgcctgattatctctatcaccgccttccttcaagttttaccgccgatctcgaggccggtctgagctcgtcgcaattcgacattactgccaatcttgcagacggggattcgagggctggcttggatcaacgagcaaagaaagaagtgatcaagattatgaagagtcagaaggtcgattttgatgaagcacggcgcatctacacagagcaacgatttgcaaagaataacatcggaccggacggccggccaagggaccctaaattcgtctcattttcgtgatttgccttcaaccatatcaccagtcctagcgtgttttgtggccattgtcagagcggatctctcgctagcagaatccgtacaaatagaggtcccagcttttgaccggtaatatctcatctgtgctgtcagagcgctaggggtaattattttatcacttgagcgggcggatatcttgtgtctgaaatgatccttggcaacttaaacctatggagttgacgtattatcaaaatcaaatacaacacgtctgtctgtctcgtccgtgtctaagtcacttaatattacatatggccattcagcactgccaatagccagccagcgccaaggcacatttcgatccacctcctcgcacccccataaacatgttcaaggtagtcaagcaggagaagaacatctaacgcatggaccacgctttggtcctaggtcgggaatagctttggggaggagaggcgctctcaagactgaaaaccactaggaatcatcgactgcctgcatatccgggctgttggaagcccggtggcaatgaaggggctcccgctggaggtccaaacccaggtggtccaaacccagggggagctgcagcttgtgggacgaagggcggttgacctgcaccattgaatccaggtggtagaaacgtctgtggaccaccgtagccagcttgggaaggcggaggtcgagctgggagcccgggaggtggggtattgattgaagggacgggaggtggaacatgtcggtttggagggggaacggtctgatagggcattggagggggtgcactctggtagggcatagctggcgggataccccggttcattcctagatcgggtgtttgtgactgagccgtaatcaatgggcgagagctatcgccgttcgacatggcaggtgttgctgatacgcccggcgcagcgccagggaactgcgaaggttgctgaggttgttgagtcggtggctgtacgttgtgtttgcgagcctgggctgcgagcattcgctccgcttcatccccatgtctctcgcctttcccatctttcttgtacgcatactgtaccgaaacctgtttgttcatcaggtactggccattcatgttggagatggccgcgtccgaggattcgaaatcggcaaaagaaacaaatccgtatcccttagagagattgttgtcatcacgagcaatctgtaaagtaatatgaaaaagagactgttaaaaatttccatcttgttcgtattgggggagatctcactttgggcggattgacaagattgccaaaccggctgaacgtatcaaacagaacctgctcggcaaccataggatccaggttacccacaaacagctctgcgccgatttccacggtcttttgtttatcggctgacgctttgttaacgcgaataggcttgctatggagacggattccattcatgatcttcgatgcatattcggcatcttcctcgctgatgaactcaacaaatccatacccctggtgtagctgcgtgacccggtctttgggcaggtggacgttgacgatgcgcccaacctgtagcatcagctcccatacaaggctgtccgaaacccgttcatcaaggtttccgatgtacacggttgcctctttatcttgttccctggggtaagttagcatcaggtccctgtggggaggaaagaaggtcttaccaatgtcttgcgttagacatggcgccggtgtattagttggagggagaggggagaaaaaagctccccctagcggaaaaggactcaaagatccgagaaaaagtaataggttgtgaaactctagcgaaacctggaccaacaaagtagactaatttgagtggtagtagagaggtaatgaggtgtgaaagaaagtgttgaagtgaaggaaacccggagttgagggatgatcagtgacctttccgaaactttttgattccgcaaatcctccctgttttccacttcatccatcaaccacatttcctacttgttcacttgaatcgaccgtgaaccaatttcaatttattcgtgttgatctccttgaaacctttccaaaatctactttcataaattcacaatggttcaattctccgaggagaccaaggttagttacaaccccgatcctccttgagaccgggtttctaactctcgctttttgatctatttaggagcgcatctcgaaggtcattgatatttctcgggtcgcaattcactagtgagccttatagcacacctccacgccatcctccgagctgaccggcgataaccatctagcggatacttgcctctgattgtctatctgggtatgtatatatatatgcctttggtattctcaacacaataagttaacaaaacaacaaaaacaggctacacctatagcgagcccaagccgacattgttcaggtacgcttcaactccttgaattccagctgtcatgactaacttgatacctagattgttctcgcctcttgcgtaaactgcacgttgaggatacgcggatcggatggatatggcgcagtatattgttggatgacctttcaactattccctccgggagggatggtaggttcgaatatctggataatcactgtttgcagcttgtgaaagctatatgatttttgtaattttaagtctctggccgaatattgtccattttggtacagaaatgctgtgtgatctgcgataattccggagtaaacaactgagctttgtataaaaaagaagaaaatctggaggtctggagattaatgtgtggcatatgttactatacgctccagggctaagatctacggagttactcggcagtcacatgttctgacattattattcttagaatattctccatctatcttctccctcctctaacattgttctccacacactctcttcctctcgtctctgtctctgtctctgtgtgttcgattttcctagcttcgtctctaaggcaggttcatgactagtcaagatggcctctcgtcatcctttgtggagcccgtagcaggattcacagcgggaatcgtgtcaactctatcgctacatcctcttgacatggtcaaaacaaggctacaaggcaagcatcgatattatcttggcgctgcttggggtatagaataactaactccgtcttggtatatatagtcgatcgatcatcttccgggtttgggacttcactgcaggtcattcgcaagatattctatcatgagggtggctgtgccgctttctaccgaggacttacccccaatcttatcggaaattccacaagctggggtttgtacttcttatgctacagcagcttgaaggatactattcgaatatatcgcaaggagagcgagcagattctcacgtcgtctgattatcttctcgcgtctggaagtgcaggtatgcacatgtcatatctaattcagcatcgttcctccgttccccaattaatctttggatttccataggcgttattacgtcggtcctcaccaatccaatctgggtgatcaaaactcgcatgttgtcaacgggttcccatgctccaggggcatattcttcgtttgcatctggagcaaaacaaatataccaattggaaggaatacccggcttctaccgaggtctcgtaccagccctctttggcgtcagccatggtgcccttcagtttatggcatacgagcagttgaaacttttcaggttgcggtcgatgaataacatgggctcaattgagagcagtcgcttgggcgccgaacgggtgctgggtaatgttgatttttttgccatctccggtctatcaaaagtcttcgctggcagtgtgacatatccttaccaagtaattaggtcccggttgcaaacttacgaggcccatctgatttaccgtggggcgattgatgtcatttcccagatatgggcccaagaagggatcgcaggcttttataaaggtcttggtccaaatctgttccgggtacttcccagcacgtgggtgaccttcctggtatacgagaatactaaggtctacctatcccagctggcacaaaatccatgaaatacttcctgctaatccctgcccattcttatatcaattgatcctactggagccttggatcaggttagcaacgtcctgtatattcatcaatttataacatcttcggctgccatatgccgatctctaatcttttcacgatcttagctgaaattccgcagttaaagtactatatataaccagataaatgaaggaaggattctaaagtatagtcacgagtatacaattggaataagtaaaagtctcaaaagtctatacatgttatagcaaccagaaaaggcccacttccgtgtatttctttgcttcctatattatattagtagccagtagccacgtaccgtgataatacaaggcctagtaggataactagatcttggagtataacgctccttttaacaattatacttattttaccctttggactaggatcttattattcctaccataaaaagaaagtctcccttttattcaatggatggctactattcctccaaaggacgagaagagcgctccacagtcgccgtcaagttggaagactgcgatgctctcggtacatacgatgcccgcgtgcagtgaatatagatagtgtcttcaggcctcgcttatacaatcaggattagatagcctggaaatggtcaaaagcgtagcatattacggatagaattgatcaagacgaagagaaagcttctgagaccccagagttggacgcattcccgttggaaattgaaaatgataaaatacggtttgaagctgactccgaggctgttcataataccgagaatgataattacgataaaaatgacgatgaagagtgaggatagcgacactgataatccttttgcgtaagatgtttttgacacaaagcgataagaagtagtctagttattgtaaactcaattggtttcattgagtgtcttcggtcatgatagagactggtttaaattggttctggtacatgtatccctcgggtacctggtcatatatgaaacctctcaccctcagatttggactctgtagatacatgagtacccgatgcacttatctatggttgcgaagtctcgaatgaagatggaataaagtatgaaataggtgctgagctagtcaggccgagagcaaactccccggactctatactgttcagtccgcactagtactccaggatacacggtttgaaaatataatactgtgccgtgggatgaaagccatatgccaggcaccaaggcacttctgcaccttagataaatccagacccaagaccaaggagctcagctgcttcacgagaatagctgttgacattctaacctgggctctgactgagtcacaagctgccttgccctatttgatatgcttaagcatcgcctcggtacaaacacggaatcatagttattaaaggttggataagttgtactcactttacgattgacggggtttctggatagacaggcgttagtgcgttcaaaagctatgaaacttaccttcgcagatagagaattgccagcccttcttctcattatagcgagtataggggatacatctgagagagagagagagagagagagagagatcggttgcgtatcgttggtgtcttgaggtagcgccaaaacttccgcaggtcacatagatgactgtggatgtgtttggtttatcttagtggccaaggcttcctgctcaggtggcttctggaagatatcaaaaatatggaagctgcgtatatactaggctccataactcaattggttagagtgccatgctgatgacgagggaccaaaaatttatccgtaccctactattctactttgataattgcatagatacagagttagagccatcaagttggctttgcgtctggagtgagttatcctcgaatggtataaacttcgaatgctgactagatttgtagggcattttatccctccagcaagcttgtgccgcccaggttgctacttctaccactcttggcttggcaattgggactgtgtcgggtgccacagctctatcgtatgacccccatatcttgaaatgataatgtagtatgctgactggaactgcagcgctatggcaaatgtgcccatcagtggtgctctgctcgagaagtacgggtacctttccctgtcaatattttcaggggtatccttgctactaggtggcttgcttttgattgctgcacgtctagtacagaacagagagcttcgagctatcgtgtaatgcttggccattgggttgaatttgaaaaagtgagaggtgaagctgatagaagatgggaagatcgatcaaagtccaaagacgattgatggatactgatagaagaggatttgacggaaaatcgtgcagcatattttccactagactataacaaaaaccaatgttcctgtttaaggcttaaatgagccataactatcacattctgataagatttatcgaaaaacaaaaaacaaaaaagaatggtcccagagggggtcgaaccctcgacatctgcgttattagcacagcgctctaaccaactgagctatggaaccgaatatggaatacactcagcattttttacatctttgaggcggcgggtgcaaggacaccaaaatacaatcttgttctacattcgaaacgtcaacttcttcggacgcgaatgccagctacaacgaccactaccagtctttctttctgcatcatctgtggattagatgaatttttcgcgggggccatatcacaatttacattattatttatcatatgactctatatatagatcgttgaccacatttacattgcttgctttcttgcttgcttcatgcttgctatctggctctttctttttttggttcttttctttgtgaatagattttttgttagcttagcgaaaggtctgatgtgcaaagtttatagagtggtcagctataaccaggctgctcccacttctcttcttcctctctctatcgctgtttcttaattaaatggacataggcataccaactaatgtaattagtatgaagtgggcggctggcctaatggtaaggcgtttgatttcggctgaacttgattcaaaaggttcgacatctcaaaaaattgcaggttcgatccctgcgtcgctcatccttttttattttgttcaattcaataccttcttcaccctgcctgaaatttcagcaccgccttcattgcagaacgaagtgaagcaattaaataataacctcgtatatatgtcacatgattggttatttttattctataattgtgccaagtgcctaatatacaatatatatagttattaatacatcctacttaataatcactcaataataattttagtctttattacctactttattaatatcctatacctgtaaagggacgaagctagattagaattcaagctaactaagccgtttactattatctaaaagcttaaggaaaggaaataaagcttataggaagaatgtcaggaccctagtactaagaaggctgatgcctgagattttgcacctatcagggtatatagggaactatagactaggcaggagccatatatactacctatatagcccccttcttattatatgacctactacctatatattatccttatatactacttcttaggagaagtagctattagtttctaatatactactatatatactactatctctatttcctaatcctctattatatatagtattccctnnnnnnnnnnnnnnnnnnnnnnnnnnnnnnnnnnnnnnnnnnnnnnnnnnnnnnnnnnnnnnnnnnnnnnnnnnnnnnnnnnnnnnnnnnnnnnnnnnnnnnnnnnnnnnnnnnnnnnnnnnnnnnnnnnnnnnnnnnnnnnnnnnnnnnnnnnnnnnnnnnnnnnnnnnnnnnnnnnnnnnnnnnnnnnnnnnnnnnnnnnnnnnnnnnnnnnnnnnnnnnnnnnnnnnnnnnnnnnnnnnnnnnnnnnnnnnnnnnnnnnnnnnnnnnnnnnnnnnnnnnnnnnnnnnnnnnnnnnnnnnnnnnnnnnnnnnnnnnnnnnnnnnnnnnnnnnnnnnnnnnnnnnnnnnnnnnnnnnnnnnnnnnnnnnnnnnnnnnnnnnnnnnnnnnnnnnnnnnnnnnnnnnnnnnnnnnnnnnnnnnnnnnnnnnnnnnnnnnnnnnnnnnnnnnnnnnnnnnnnnnnnnnnnnnnnnnnnnnnnnnnnnnnnnnnnnnnnnnnnnnnnnnnnnnnnnnnnnnnnnnnnnnnnnnnnnnnnnnnnnnnnnnnnnnnnnnnnnnnnnnnnnnnnnnnnnnnnnnnnnnnnnnnnnnnnnnnnnnnnnnnnnnnnnnnnnnnnnnnnnnnnnnnnnnnnnnnnnnnnnnnnnnnnnnnnnnnnnnnnnnnnnnnnnnnnnnnnnnnnnnnnnnnnnnnnnnnnnnnnnnnnnnnnnnnnnnnnnnnnnnnnnnnnnnnnnnnnnnnnnnnnnnnnnnnnnnnnnnnnnnnnnnnnnnnnnnnnnnnnnnnnnnnnnnnnnnnnnnnnnnnnnnnnnnnnnnnnnnnnnnnnnnnnnnnnnnnnnnnnnnnnnnnnnnnnnnnnnnnnnnnnnnnnnnnnnnnnnnnnnnnnnnnnnnnnnnnnnnnnnnnnnnnnnnnnnnnnnnnnnnnnnnnnnnnnnnnnnnnnnnnnnnnnnnnnnnnnnnnnnnnnnnnnnnnnnnnnnnnnnnnnnnnnnnnnnnnnnnnnnnnnnnnnnnnnnnnnnnnnnnnnnnnnnnnnnnnnnnnnnnnnnnnnnnnnnnnnnnnnnnnnnnnnnnnnnnnnnnnnnnnnnnnnnnnnnnnnnnnnnnnnnnnnnnnnnnnnnnnnnnnnnnnnnnnnnnnnnnnnnnnnnnnnnnnnnnnnnnnnnnnnnnnnnnnnnnnnnnnnnnnnnnnnnnnnnnnnnnnnnnnnnnnnnnnnnnnnnnnnnnnnnnnnnnnnnnnnnnnnnnnnnnnnnnnnnnnnnnnnnnnnnnnnnnnnnnnnnnnnnnnnnnnnnnnnnnnnnnnnnnnnnnnnnnnnnnnnnnnnnnnnnnnnnnnnnnnnnnnnnnnnnnnnnnnnnnnnnnnnnnnnnnnnnnnnnnnnnnnnnnnnnnnnnnnnnnnnnnnnnnnnnnnnnnnnnnnnnnnnnnnnnnnnnnnnnnnnnnactattaatatattatattccctctataaagccctttatatcttacctagttaataggctgtatacctatataatatatacctttatacttattaggttatttcttctaatcctatatttaatagcctaaaacctagtctaatataggtattaaataatatagttaatagtattaatatatttaggactaaggtttagtaagaatttagctacttttctaattacttttataatatttaatcttaagatagtagttatatattatataaatctaactttagcttaatatctaacgtattttactactaagtaggctactactagtgagtgggccacctatctaaaatatgtcgattaatttaaacccttcttctttaactactaactatactactaattcgctcttaatactttagaaatttaatagagtaagagggtaggatcttactagctatctaggcttttaagaatcaagaaatttctttaatttataagatagtatactattttaaaatcccttatactaccttataatagtactttaccggtaataccttttattctaaaatatatactaataactataagttaactaaaagtaaggaagaattactttaaaaatagatactctctatagattcttataaagtagtctcttagccctcttttatataagaaatagtaaatcttcttttctattaatatagaactactctaatctctttagttaataaaaattaggttataaaatttataaaatagtaccttttcctttcctcttaattcttaaagtattataattataagtatataaaatataaagacctaaggattattagagaatagtttaatttagtttaaaaaactattctttagtatagaattaaattagataatatttataactttaataagataggttttactataggattaattataatagtaaaggttataattagatataaatactataattagtaattacttttataacctagaaattataaataagtaactataattaaatatataaataccttaggttaggtactatctttatatattatttttagaaataaaatatttattaaatcttagtttaatagccttttaaagaattagtattttaaagttaatttaaataattagatttctaataagattaggctttattagctttaaaagctctttattcctttaactttattatatataaagggaaggtattaacttttagtatttaatagctatagaagttatttaatcctaaagtttaataaaatttataagtaaaataatattatactaatttatatattactatattcctcttaccttttataactacttaatattagctattttataatattaaaataggtatatagttagttaattaaattaaaaatataggttaagattaattatattaataaacttaaattctttaaaatatacctatttatataaactaaagcttttaaattagagataattaagaataacttcttagtagttaatttaataccctttttatttaattaaatacttttaaagctaagtatttagctttaaatacctaccctccctttaagctaaagtaataaattaagttagaattttatccctaaaactctatttatagagaaagaactatattaataagctttattaattaaagctttattttatataaagtcttatagcctactaagtctattaaattatatattagattagtttataaaaggcttctatcttataatataaggtactatcttacttactaaagaaaataagaaactatatattattaataagaaataaaagtaaaagtatattagatcctagaggtagatacctactaaagaaggcctcttagtttaagaagtctctatattaattatatagtaataggaagtaactaaagggcctctctctagctctagtataccttagggatcggccattcagctatatatacagcccccttagggatatagaatatataggttactagggtatagaagagaaatatatctagatagatagattatttagttaaattaatttaatggcattttagttaagatatttatatttaaaattagtaggttaggataggtggcctacttactagtagtagcctacttagtagtaaaatatattatagatttagcttaatatagtaattctattaaatagttttaatagcttaatatttattagagaattaactttttaactaataattagattatattttaatactatacttttaatataactatcttagtataattaaagcttcttttagtctctatcttataaaatatagatattaagaaactaactaatatctaacttatataattcctagtatttttttatctattaatctaaatatattatttaattaatatattttaggtgattaataataatattattaatataaaagaaaataataatatt

SEQ ID NO: 61 - DNA, 660025 bp, Penicillium roqueforti
  misc_feature (753)..(1077): n is a, c, g, or t
  misc_feature (4516)..(4816): n is a, c, g, or t
  misc_feature (116281)..(116429): n is a, c, g, or t
  misc_feature (229298)..(229454): n is a, c, g, or t
  misc_feature (257463)..(257706): n is a, c, g, or t
  misc_feature (315650)..(315781): n is a, c, g, or t
  misc_feature (443448)..(443550): n is a, c, g, or t
  misc_feature (445423)..(445936): n is a, c, g, or t
  misc_feature (511917)..(512141): n is a, c, g, or t
  misc_feature (527138)..(527823): n is a, c, g, or t
  misc_feature (564607)..(564933): n is a, c, g, or t
  misc_feature (590090)..(590440): n is a, c, g, or t
  misc_feature (649611)..(649800): n is a, c, g, or t
ttaataagttctttagtagtaataagtctctcttagaatactacttcggctttaaggacctggattctttcttagataagttaggtagtttccacggttactttaggaggattaattagattttcctaggtctaggattctattcgttcggttctagtagttagagaagtagttcctattttattccttagtcggggctgattcttagggagttcggtatttccctaggattaccgataggttaagggagccattgtatcttaggcagttaaagaagaagaattagaattataaaggtatacattatataggtatacggcctattaaccgggtaagatataaagggctttttagagggaacacaatgtattaatgatataccaagactaattcttactaatctcggaggggcccctagggggtcctaaactataaggaaatctatctgcctatgttcatataacgaaccccttacggatcgatatcgaaacagatgtatgataatatagatattccttcccgagcctgtgcaggtttacatgtatttccctcttgtacggacctttatctgttataacaatccgctgtacttcttaagaaagaagtaagcgatttataggctaccaacgagaagcagaagcaaaagtgtactagattccggaggcagatacctgctgaagaaggcctctccgtttaggaagcttctcaattaattgctgcgccggtggaagtagctgaagcaccccccccccnnnnnnnnnnnnnnnnnnnnnnnnnnnnnnnnnnnnnnnnnnnnnnnnnnnnnnnnnnnnnnnnnnnnnnnnnnnnnnnnnnnnnnnnnnnnnnnnnnnnnnnnnnnnnnnnnnnnnnnnnnnnnnnnnnnnnnnnnnnnnnnnnnnnnnnnnnnnnnnnnnnnnnnnnnnnnnnnnnnnnnnnnnnnnnnnnnnnnnnnnnnnnnnnnnnnnnnnnnnnnnnnnnnnnnnnnnnnnnnnnnnnnnnnnnnnnnnnnnnnnnnnnnnnnnnnnnnnnnnnnnnnnnnnnnnnnnnnnnnnnnnnnnnnnnnnnnnnnnnnnnnnncactgggagtagtagggtgctagagaggagaacaccatggggtgactactgagaagagaggtggaaaggtgtctgcgttgctatccaggcctcgggagtgctttgatgtcacatagccgcttaatcatcctgctctggaaacccccactgcattacttagttaactaaaggggggtcgcactggccaaggggggcgcgatggtacaattcaataataatatcgggctgatcaaaattaactagttaagggttgtggcataagcaggtaaacttgaaagtagattcagaatatatgggacatgacagggatatgaagtattataattgcttcgcttcgctctgcaatgatggcaacgtagtgctttcagataaatttagaagaccccaagacggacgttcgctctggcaactcgaaggggccatgctgaactacctttttatggccgattgcaactatagaacctttctctgggcccatctcataaaaaggacctctctccgagcgcatctcgtataattggtggctgtggtgcaattcatttagtcggttccatttattatcggcagcttccacaagcgtcgactgatgcgctgaaggccattggtcaaatcgcccgtgggctgcactattctgatcccgattgagtgatttctccttctgtcgacggtggcgaatgcagagcccacaacaaatggcaatcatcaacaccccgcctacagtacaaccaacgatgatgccaatcttgacagctgtggagagaccattgctgctagtagttgagctgcttgtttcggtatccgtcttggtcggtttcaagttcgaatttgtaggaatcaaattccaggtgttcttccaggtgtttttccaactattggaagaccccgaaatggtggattcattgtcccctattgtcactgtattgacaataaaagagccatcaggtcctggtgcttgggccaaaaaccacttcccaccaagccaattaacgccgacaaaggctgcttggagaaaagcgcggcctagagcaggggtgctgttggtggccatgcatgggaagtattgcgtcggcgtcttcacaagcgggggctctagtgtgagatttaggagagcgaaggggaccctgatcgtgatttcttcgttattgcggctattcatactaaacgtgaatgccaaataacttggagaggtcacaattttgtcgtactgcgcgtcggacgtgttccaaaaatagaggccataatcaggttggtatatgacgggcaactcagcggctatcgcatcacatgagcttcgaggcagatatatgtatggattgactgggtccacaacaatcttgagaccggcatccagggaggaattgccctttgccaagagacctgttttgttggagtaattccaaggcgatccgccttctgccactccaatactcatatcgtacatttcgatcgggaagcttccacttgaaaacgactgagcggacacggttccaatgaccctattctgatcatagcctcccagatgaagtgagccagggattcccagagatgcggagccaatatgcattccataggaatatgatggtattttcgtggacccctcctgctcgtagaggtagctggtgatgaaggtcgcgttgattttgatcgaagccccaaatgtctgattaatatctggactcccaagagaaagggttccaacctgtaaagggtatgcttgtccaccagggtaagtctgccatccagcagatatggtaatcaagtcgacatcaggaacgtgagcaccgtcaatggttatccaatctgttcctcgtcgtgctttggcataaactggaactgcgtccgtacatccccagtccacataaccccatgttccatatggaggtagtgaaattgagttatcgtccaaggtgactgatacgtcgctgtcaaaaagacccgctttatccccatagcataccgacgagagggacttgttgtcacatatggaaggtagtaggattttactttcccaactacctcccgggtacaacgccactaccgatgaaggcacaacaagttcagagtagttgcttccgatagacaccgtgaccgcttgccaagggccatcaggtccgaactttttatcagaccaggtcatctcccggggaccagaacagaggaccttatcgaggcaaaggatccaaattgtgaaaacacattgttgtagtcctctcattcctaagggggaaatattgttagcgattattttctcccaagtatatagtaacggtgttttacaagacaggactgacttgaatcacagctgaagtgacgatgtaatttatcggtttgaacaatgcagtaagcaatgaaggccacaaagttaagcttcaagtatcagacgaagataggtcttcattcactcgtcactgccactcatagaatatcatcagacaattagggtagagttccgagttggagatttagagattttttcaaaagtcaacttgggtgaatatccggacaccgtacagtagatataatccagtaccatcccaagcgccagatataatatagatgtttctaataataagaagaattgccaaatgcgattgatagttagcgccaagatgtgatgaagtcgggcacggaccaagacaccccaccgtcgaggcgttcgcttttgccaatcagtcgttattagagattctagcgtgtctcagatcatgcatcgacagcgcttagccgcccatttatgactgctgcaatcacctgaggttgtccctggggaaatggacagctgagggggtcgttttctgtcgcatgcactttccgaccttctcataccctccctcttacatgcattttgatatggactgagaactgcaaacacatcgaggttttccttcgacatttacgtgaaattgaggaatatacctgtcaatttttccaggcgataagcgaccatgttaagtatggccacaacatctccgagagtctttcgctccatgttcatagctttgtccgctctattcggctttgtgacattattgcgactttcatacaatgcgcctctggatgattctaattcgcacttcgacggtctgtccgggaagcaagtggacgtggactggtctcgatttgcatacacccaatatgctaccgacagatcttatctgtgcaactcactcatgattttcgaggctcttcaccgccttggaagcaaagccgatcgcgtgttgatgtacccatacgatttcctcttgtctgagaacgatagtttgccggaagctcgtttacttcgcttcgcaagggacgaatatgcagtcaaactcaagccaatcaaaataatgatgaagggtgggggaggtggtaaggcatcccaacttattacaaaatgtcagaatctaggatgaatactgtcatttttcatccctgatacagttggatcacgtgactnnnnnnnnnnnnnnnnnnnnnnnnnnnnnnnnnnnnnnnnnnnnnnnnnnnnnnnnnnnnnnnnnnnnnnnnnnnnnnnnnnnnnnnnnnnnnnnnnnnnnnnnnnnnnnnnnnnnnnnnnnnnnnnnnnnnnnnnnnnnnnnnnnnnnnnnnnnnnnnnnnnnnnnnnnnnnnnnnnnnnnnnnnnnnnnnnnnnnnnnnnnnnnnnnnnnnnnnnnnnnnnnnnnnnnnnnnnnnnnnnnnnnnnnnnnnnnnnnnnnnnnnnnnnnnnnnnnnnnnnnnnnnnnnnnnnnnnnnnnnnttgttttgtttgttttgattactaagttgtccatcagattgtcatgttttaggactattgtcagttttagagagttagagaatttattaagatttttctgccacaaaatacactcgccttaccaccgtttttccgtcacaaaacttcaagctaaaagtgagcacagcaccgtggtcatcgagctacacgaaactcctcgcttttaatcaaacggaatatgatcgggttcttaacttggattccgatgcaacccttctgcaggtgcgtaggtcaatcgtggccttttctcatttcaaactaacgtgcgtgaaggctatggacgagctgttcctgcttccacctggctcggtcgctatgccacgggcctactggttaaatccaaaggatcgagtctttacgtctggactaatgctcatccaaccgtctacggttgagttcgatcgcgtaatggatgaagtttccaaggctacttctgacgtatacgacatggagattatgaacaagttatatggagatagtgcgcttgtcgtaccacaccgcccttatactcttttgactggagagttccgctccaataatcatgaagcctatctgggtaatacagacgaactgtgggatgctgagaaaatcctcaaagatgctaaatatctacatttctctgactggccagttcctaaggtatgtcataccaacttttggtaaccttcaatctctattttggatatgctgacctcttccggtagccatgggttgcagctactcgtgatgtgatcaacaaaacgcagcctccttgtgagataaatcccgcaactagtcaacaagatgactgccgtctccgggaaatctggttagggatatacaaggacttcatggccaggcgacttgtatgtcaatcctctcctaccttcaattcaatttctgatcaagcttactgaacctgaacagtgtatatgtggcactgctcttcgaacagaatcttcatgacacgtccggttctctttcaacggcattttacgattatcacaaattttcctgtccggccatgcggtacctctgtatggcttggtgttttcaatactctcgttccaacataaccatagaagaagccccctctgcatgagcgagactcgataccatgagaacatcagcaccttaactctgcatatgtggttttgctggtcagaacaaacgtctggtcatttcgactccgatcctgacaatgctacagacgggcacttggcaggctttttacatttcaatgcgcagcgcacttgttcaaagcagttcacaggcaacctgaacggaagcggagaatttcagggccgcacttggcctcgatttggataacatgtatgtaacaataagcaattgactgcaaatacctggcaatctggttttgttgtgttgatgtatctttggggcctcgatgtaagcatttatggaccagctcagtaggtacagtctcacacgtaagttatgcaagcagtaagagaagaaggagtgattctctataactaaatattaaactaaatagcgattaacaagcctgacaaactagtcatcaaggcagttgatctgtcccagcaagaattatacacatcgacaaattcacaagacaatattccctctaagaggtgtagctgcagccattggggttcgaggtctccacgatactagcggcaattcccacacagtcggagtttccagcagggttggcaatgccagcagaagcccaaatgctccaggcaccgtcaatgctgttggggcaggcaatcagatcttctcctgcgaattggaggtaaccatcctcgagggtccaaccctcgcgcacggagtttgtggggctggactgagcaccagtggtgtatccaatcttgccctggcctacatgaaagtcagttatttgccaactaagtaggattgtgagagtgatagcatacccatgccggagcgatcaacgaagatctcctggggagtggcggactcatcatacaggtacagagcaccgtcgaggatgtagaaggttgcctcctgctccttgggacgagcacaactggcaccctggttaggcagaccagcgaagatgctgctcttagcagcgttgaaggcagagttttgcacatcactgccagagtgaatagccacgacaccaaaagtcgcagactggttggacggggcggccgagacaacggcgctgacggaggcagcgatggcgaggttcttgagctgcatattggcggaggggatgcgaagattgagttgagaagatataagaatggttgaattgggaggattgatagttgatgtttctaggatatgctgaaatgcctccccttttatacttggagcgactccgtaccgtcgccaaggttgatgtctcacccattgagactatcctccaggccaagcatgatcctacagactataacgttgatattccacaatgtgacatcaacgtgacttttttatggggcaatcttgtcgatctctctcgtggttttgacagtcaagacaatgtcttatccctgagtattgtgttgacaggatacttcgtataagccatggatatcccagacccagcgtcattagagataagaagcatttcataaatcattgcgtatttgacgcatacctctttttggcctccaatatagctctgaatatgattctgaatatgaacaaactgtcaacccctaaatgacttacttagtattgcttcctccacaattcttccatgtttctccgaattatatccacatgggcatgatgtacgggcgatccgtcatgatctccgaatcaaggccaatcaaggtctaatgtcctttctggaccggtgaaacatgctctacaataataagctggactacggagtatggagtcttattcaaaccgcctggtttttgggcatttcattaatatgggtctctcaacgagtatctataaatagcggagtggctcaccgtccttatgtaggtcctcattcgctggcttccactttaggggcgatcttagactattcgtcaatcttgaagagaatctcatggcttagcatgagtattaaatgagaagagcactgtaataaatatacatatttcgcttgttgcttcacgattcctcgctgaatcatgaagatgcaccggctagaaaagcattttcatatctcgaaccaaaaccaaaaatgaggggatttttgtacaagcaccttgatcaggctcataattccatgttgagatatgctaataacgggaaaacaattgtccttactcgggagcaccgcacgaaaagacgccacgaacttctcctttggcgtacttgattatctagatgagtgagttagtaataaaatccgtgccccaaggcagaccgccagagaaaaacttacgatatcatcaatgctggaatatgttcctccagcaagtaccaccataccgatcaggaaaatcagcgcattgatgactgccagtatcaagttcttgggctctttccaactccctttccgaaggagcatgaaccacatcatggcagggaagtagaaggtgaatccggagataaaaagagcagaagaaattgaaagcaagtcgttgaaaaaaggtatcacctcggcaatgatgaatgccacaactgtggcggccgtgatcaccgccagccatgtcagccagcccatcttagtgttgatgaagcgaatgggggagttggcgaagatgcgaccatgcaccacacgcccaaataccacggtgttgatcgaaccgctaatgaagatcacagggagagcaatgccatacgcaatgcggctgagggtagttccggcagaggtaagtgcagggctggacacatcctggccaacaaaggcgtagattgtagcaccagtgatggtgtagatgacgatctcagtgatacccagcgtccagatcgacttaataaagtctcgaggagtgtgcatttcgtccataaaggagaattggcacatggcaaaactgtaggcgaaaattatgttcgtcacagcgatgaaggcttcagtaaaggagatgttatccttcggccacgcagaccatgctactccggagagtccaccgggcgagttcgtcgcctgcacacccgtcccgataattgtgattccaatggcagcgatgatggatacgaaatcaacatagcctagaattgccacctcggtgaaactaggcggaatggcgagtaggagcaggatgacggcagaaaccacggcaaagatgatcgagcaaatgccgcttttggtgatgtcgaggaatgcgatggttcccgtcagacagtgcgaggccgtgagaaagataagttgaagaccgagcatcgcattgactagctcatatgcaaagcgaccacaccctagccgatggcccagcaatcgacccgcatcagcatagttggcaacctcggggaaggccaatttgaccattccgacaatgtaactggtatagatggcgatgagaccgatgcccacacagcagatcacaccggcgaccatgccgagtgttgcaaaggtggagggaaccgacaaactaccgagtgcaatcgcctcgacgatgaggacgacagtgagtcgcttccaaccgagacgattgaacttgttgataccgtggtcatacaggttcctctcagcctcgctcatttccccgaccatgtccccctcaaacggcggtgggggagcatatgcggccttctcgccttccgtttccatcaccttgtcggtgtcatggtcgttagagatgttttcgaagcccatgatgctggtggaggtgagactagtctgccaggcagaacggaagagaggaaaccgggtatataagaagacaaattccgcgcactgtcgaatgcggcactaccaggaggcaaagcaggattgccttgacaaacgagattttgtgaactctgcttggctgctccagcacgtggagtacgacgctgatccactccagctgatcggccacccaacgagcacaccggaaacagggattggatccattacgaatggagtgaaagtggattgcattgaaattttaggcgaaacgcagcccggcagccccagtttagtgtccgttgtgcgatcagaaggttcggaaggttaggtaaaagaaatgcaacattggtgtaatcgttgggagggccacttgagagccacttgagagttaccgagggctctaacacactatggagtctctccccgcgttactccgtactgattgcggggagagaaatcagagacaaattcacagaagaaacccatcgaaaataagaatataaagatgtcgatggtctttctttaatcgcgccacagaagatcccgaaagccgacttgccaatgaaagactcggaagttgagtggccccggggtcgcctcccccaggcggggccgataagagttttgaaggtcacatgacggctgcaaacagagcaaataatttgatatcacatctacctcctgcgtacggagcacttgtcctacattatcctacttacatcctccttgcagacgatacgatgtacaaggctcagacgactaagagccaccaacgccatgcggtttagcggtcgtggagaatatcgcaaatattgacttgaacgggtctcccccagagacggctgtcatagacatcattgcgagaagtctcccagtctccaactcatccgtgggatccgactccattctaccctaacttttgtctacctcatgaccattgcttatctccattctaacatttccagacctgctggagtacacggaagctgcgagtcatgtttcccatgatgcatcttgaaacccaaaataccacacaacctcgtacgcaattattggggaatccagacatgcattgaacatccctgtcctcccgaccgcggcgatctttgcttacaacatagttgccttattcccagcagccgtgaccgccgggcactccgggtcttggcccccgaccgtggtatttgagcaatgtgctgtccaagtggaagtcgtcagacttccctatgcaggaaagaatgaagcgaacaggaagcaagccagcaggcaagcaatggtcaaacgatgtaaattcacatcatgcagatcgtgtttagaaggggtgttggtctatattgaaccttggcggatagtcgaaatacatcacttccttatgttccagttctgctatagtgaaatagaatgtccagcttacactatctcaatatgttttatcctaccgcaggatatgcgaggtatctagtagcgtaaacatggaggtctaaaagacttctcgcagtttcttcaactctccaaacggagaatgccggtaatctaggtctagggacgcactcctgggatttcgagttctatatttctcttttcttcttcgccttggaaatattgaggcagaaatgaattgaatttctcacacatacaaccgaaaattccaagatcaggacaactcaattaattgatagccactttcatttatagaatttcttcatcggcatagggctgaagtggcaaccatatccgtcagtgggttgaccgatttgtatgaagaacagattgacactaatcaagaaggatgccatgacagacttttataaccctccgagtcaatcttcataaatcccgttctgctcaaaactagactagtttcaggccagtcttcgtaagcagtgtctccaatggaacggttctaaaatggtttcctagcgcatccgtgaactgccggaagtcatcaccagtaggcaatgagtgtaaaaattccacgacgctgatgtgatggttcatttgagcccattcagcagcagtccaaccagaaggatccttggtaaagggtaaagcaccagtgaggttgaatgtacaccagagaaagcagaagcaaggccttcaatatggtcgaaagaagcaagtttccgaagaaggatctggtcagcattgcttggtccattctggaaggcgtctgaggttgccaaaggaaatgcgggttgtttgaggggtcgcgaggtttaaataatcaaaaagataccccatccatcggaacctcgtgggtgtaaccagaaagcataaaactgagcttcttatttagtatgatggatagggaatgtaaaagtggaatattgtaatcctcagagcataatcagatgatgaagctttcaggccgaagaaaatgtaccatcggagtgttactataagagtccagaatctcgaaaagatgaatacctcaccgttcaagtttgacctagcttgacattgcagattataccactgggatgggtgtgagaaagcattgatggcaaagtaaagacgccgcacttcgatacccaaccaagcgccggtcgggaaatacaaacatccggccacgtgatccaactggaggttgtacaagggcaaaactagatagatgattttacgattggactattaagtggataacctatggctatactgtccaaggcaagcagttctttatatatatcctgattctttggaatgccgacaggaatcatacttgacgtgatatcgggttccaggccgagttgcttaccggaggaaccagtatatatatctcggaagtaggccgagtcacttacagattcaatcgcaatcagaccaacaaattagtaatattgaaaactagtcgatcgggtggaggagccgagagtggactcatttagcttgttgaactgtgtacaagattggcttcgtcggttctgacatccgacattggcagttcgcacgtcaaaatagcggcaaatagcttaaatctcaatcggagatatggccgattgcccctcactttgagccgagagaggaatatctaatcggatatggatatcttataagagctataccaggactactggaagtactggattagtacatacttcgatatatatattggacaactttgagaacttcgacatcctctacaacctctacaacctctacaacctctacgatgggttctcacgctaccgtttctcctcaaccccatgtccctttatccggagtctggtgtcctgcggtcactctttttcaccgtgacaccgactcattagacctcgactctcaatccaagttttttgcctatctatccaaaaccgggctagcgggtctagtgatcctagggaccaactcagaagccttcctcctcacccgtgaagagcgagctcagctcatctcaactgcaagagccgccgttggccctgattttcccctgatggccggtgtcggtgcgcactcgactaagcagaccctcgagctcgcaaaggacgccgccgctgctggcgccaactaccttctcattcttcctcccgcatactttggaaaagctacaaacatgaacgtggtgaagcgcttcttttccgaagtagcagccaagtcacctctgccagtggtggtatacaatttcccgggggtgtgcaacggggtggatatggactctgagaccattgctgcgatcgcacgggacccgacgtctgcgcatgctagtggacggtccaatgtggttggggtcaaactgacctgtggatccgtgggaaagatcacccggctagctgcagcgtttgcgcccgaggactttgtgacctttggtggacagtcggatttcctgatcggcgggctagctgcaggaagtgcgggatgtattgctgccttcgcgaacgtttttcccaaagtgacggctcggatctatacgttgtatcagaaaggtcagattgaggaggcggtggagctccaaaagaaggcggcgatcgcagaaggtgccatcaagggtggtattgcgtcaacgaagtatgcggtagcgtgctactccgcccagttggcagggattcaggatgcagtagctaacctggcccctcgacacccttacgaggaggcgggagaggacgtcaaaaccgggatccgacaggtgatggctgaagttgctgagatcgagaagagcctgtaaggagttagacgtgtaccaatgaagatggatttagaccatgatttatttgctgtccaggtaattaatgttgagagatgtgagatgtgagatgttgagatagggggtggatattgagggtagttgcccgacagttcaggccattcatatggttatgtatctcccttttcgagtactagtggccaataatagctgtgctcgtatcggtctgcatctaaaccagacacctcatgaactaataaccccggtcctctggcccctgtactttcaaagatctagagaatcaagtccaaatcatagagtctacggagttgtgctaaatacggacgcttggcagaatggtatatttgcataaaaccgacgtgatagccctacatgcataagtatgaaggcaaataccaaatgaacctcggcttaaacgaccaaaaactcttccaatcacccaaacatcggctcagccgagcagtcgattactgatcgggccgggactaagtggagattgtcgggatattgaagatattgaagccaatcaacgggattgttctatcttttcttctttgtttaataaagatgcagcttattattccatatgaccacccccccactacagctgaaatgagcaatccctccgatatgaatggagtactacatggattacatatagtagacgggtctcgaaaaagcccgtttaccatattgtcaccattctacctcatatcacgtcctacgcagatcgcagatctcgctctagaggtaatctcttgagtctcaacaatggagctctccgagaatgctaactccctacacttgccaacctccatcccattctggcgacttgttctcagccccggtgctatcacgcaagaggttgccgaccacccttgtgccggctcagggaccgaagacgatccctatgtcgtggaatggatgcccaaggactttcgaaaccctcttcagttaaagacttccatgaaatggtttatcaccgtggtcgccgccatcgagaccttggtcgttgctctggtctcgtccgcttatactggtggtattattcaaatcgaagagcgattcggcgcaaccaccgaggttgctaccttgggagtatccctctacgtactgggctttgccttgggtcctctgatctgggccccgatgagtgaaatcttcggtcgccagcttgtcttcatcacaacctactgcggtttgaccgtcttttgtgccgcgtgtacgggcgcgcagaatatccagaccctgctggtcttccgattcttctccggtgctttcggctcctctccccttaccaactcgggcggtgttatcgccgacatgttcatggctcgcgaccgaggactggccttatcggcctttgccttagcaccattcctaggacccgttattgggcccatcgccggtggcttcctcggtatgtctaatggaggctggaggtgggtgatgggtctcttggccatcctctgtggcgtcatgtggttcttaggagccgcgttgaagcctgagacatatgcccccgttcttctccgccagcgtgcaatgactctctccaagcttaccggtcaggtgtactacagcaaattagatatcgatcaaggacgtctcacgctgaaagccgctttgaaaatttctctttcccgacccatgattcttctttttcaagaacctattgtcttgctgctgtcgatctaccttgctatcatctacggaaccctctatatgcttttcggcgccttcccgattgtgtatcagcttcatcgtgggtggaatcaaggcgtcggcgccttatcttttatcggtgtcatgattggtatgctcgctgccgttgcgtattcaattcctgaaaataagcgctacgcgaaacttctggagaagaatggtggctatgtgcccccagaagcccgccttccgccgtgtatgctggcctctattgccctccctttaggactcttctggttcgcatggactaactctccatccgtccactggcttgcaagcgtcgctgctggagttccgttcgggttcggaatgttgcttgtcttccttagtgtcttcaactacctgatcgatgcttacaccatctttgcggcatctgtcctggcagctaacacgctactgcggtcattattcggatttgcattcccactcttcaccaagtacatgtacgaagacctggggatccattgggcatcctgtgttccggctttcctggctcttgcctgcgtgcctttccctttcctactctataaatatggactgtccatccgaaagcactgcaagtactctgcgcagtctgaggcctttgttcaaaatcttgttcaggcaatccaaaaagcccaggagcctgccaatattgaacctgagatgtgcgaaaccacattggcaaatgaggaagccgaatcgctctctcacgacaaggagagccccacggatgtccactcaattcatcacactctttcacgaacttctaccaatgccacgcatgccatgcatcgggtgcccacatacgaagctaacccttacgacattgaccgcgttcatacacgagagtcgttcaaataatccaagccatccgtcatagaaggggaacatgggcgttttaaaggatctccgaggataccaaaagagaaaaggtccaggattttggacttcacgttttgtaatgttgcattgctccgtcttttttcttttttcttttttcttttttctcttattgtgttccatataccatagatcgcgttgactgctaattataattgcacttcaaggttttgtaatcttgcgttatcctgcttatacatacgaagatctgtgtagggtttatgcaccctacgttgtagagactgggccatatgcgagggcgagtcacgaatttacagcgaaatgtaaccagtccaactcattctcgtatacggagtaataatcgataaattagttctatcgtagatgcaaaacaaaacattcactttttacagtccatatacatgccaaaagaggaatttcaataccatgacggctgcgaacatggggaatacaaagcataagatcaaaccagcaagatcccaaaaaagcagaccgaaaataccaccgcaagcccaaagacgcatatttacaactcgctatgtataaaaatctcttaacggcgagaaacacagcacaagataccagacttgcccaggaaccagagggatccaataaagcggaaaatcgacagaccggcggtcgtccacagaatagcggcgaaatacttggaggtacgaagggtagaagtgttctttgaatgttagtttatgccacagcctggagttagacaagatacataccgtgagacagagacgggtgatgccttcactggtgatacacagtgcaaggatcaggttgctgaaaatccaaatcaacaccaggttggttcggaaagccttatagccatcatccatgcttggttcgtcattatcttcaggctcaacatatggctctagtgctctcttgaccgtcgattcgaactgactgtcgatatcggcctgtggcttatcgacttcttcaatgaagtttgacttggcgtcgtctttcttcgtctcagcgacggggagcgaatcgcccttgtcagaacccttggtaccccaggaaacgtcatgccagttgcagaaagcgtagaccatcaggatattgatcgaacatgtcataccggcaaagtacgcccaggaggacgtgaacatatgccagggatccatgtacaagaaacttgcgatgaagtaaataccataagtcgaaaccaaagcgatcaggacgataccggccccggacgaaccgaagaaagactttaggaagtgggaaacacctcggtccatagagaaatcaagcgtgcctccagtgaaagcattcttgacaaggtagaatgataggaccatgatgtaagtttgaacgatactgaaatacatgaacgaaagcgtgtatgcgagacgtgaactgtttcaaatgtcagtttgacatgatggggtgatttttttcagattttagcttaccctttcggtcgatttcctagcgctaggatgaactggagcatcaagaagaagatgtatccgtacttgaggaagttgttcacgattggcgtcgcttcgttaccgaacggccatcccctattcttgttggactcactaggagttccgacaagatccatgatgacagtagtagtcagccagaacgaggctagtacgagttagtatgagattcaccaaagaacacgagatccgagacataccgagagagaaccaggtcatgacaagacccatgaagttgtatgtcatttggatatgtaggaagaacagccgtaggaggttgtggccactcttataaatccttccaaaatgcatcattgcgtacaaactggcggcgaacgaaccgttcaaccaacgacgtcgctgactgataaactcggctgcaccctccggcacatcagtctcgccctttgacgccttcacgtaggttagatgccatttaaatccagcctttgccacaagctcgaaacataagatacggtcctcggcgaggaacatattctttttaaagatattcatgccctcaatacccttcttacccaactgctttgagagtgtatgatcgccgtggaagtactgctctagcgggcgacccataatagcgcgatagcggtacgcggagaaggcacccggtaacacactaacgtacccgaaggcactctctagcggtttgtcaagaatattggagatcttgtactcgaagttttgtgcggcgacgagggggttcatcaagtttttccaaccttgtcctaacattgcgtgaatctcaccgcaagatccacctaggttcttgtcattgtagaaagactcccacaatgcaaggagtgatttctttcccggtttagttccggcatcaatgagaatcacgacttcggggttaaggattcggctgaaaccgttaaagagccagcggtgggagttaatctttttactgttcttctgcttcagacagaaaatcatttgaacgggaggaaggtttgatgactcgttgccctggggccggatcaactgttggcttggtgtaactgagagttgggtggtatattcgaacttgatcttgttagtggattttcgtcggccacaaagacaccgggaaagagggtagactttgccaaggtgaatcaagactataagaactcacgatgtgtgcgacggtttcccgaccatcgacggagcgcttcatgatgccatcttggtagataccaacagtggccaataagtcgagtgtatttttgtcgcaaggatcaataccatcaaaaaccaaggagcacacaatcttttgccaggccgggccacccttattccagaattccgacttcttcaaattgacgatatctcgaatgttctgcatgacaccgtggagcgtccgcgcggtcagaactttatcttcgttgtaatatgtgatagcgatcaaaagctcagtgtgtcggttgtacatagccggtcgcagattgtatccgtttcgtagggtgaactcgtcaggatcacaggtggccgcggtatctgtgtgcgatcagctcgagtcgcatgatcaatatttgacacgaagacttacaacgcagatgcgtgaattcttccgggaagccctcctccgattcccgatactccttctgtatcgcattctggatggcgcttggaactggatagtcgacactgagcacagagccctggaccaacttgatctttcgcgtagcataacgccgcagccctgacacaggtgcctgtcggttttgccaagcttccgacggagtctcagacatgggtgattgaatacccgaacgacggctgttgagtcctcctgcggactcctggtatggaccatcggggaagatggtgactccggggtcctgtagtgtgtagcgacggagggaatcggtcgaggcatatgggtcatcgaatgaagcgttgaaagggctaggctggtttcggtaaagcaaagactgctggctgtcgaggttctcgggtttctcctcgtaaccgtacgcttgctgtggaacaaactgaattagcatccactgctgtcttggtcggtctcctctgtttgtttgttttttttttttgttccgagtcgctggtcactcacctctcgtggaccatacacgctagtctcgctggcttggggagaatgagataggtcgcctgagtgaggcgagtgaggcgatgtgctcctctgaggaaaagacattatgtgtggctcgcgttccctggatttggtggaaaggaaatacagatatggttggcggggtgatattttaaggatttaaagaaaatatgagagaagactgaactgaattccaggtacaatccggcgcctcaatagcaacagcgcaacagcgcagcaatgacctcgtaggagaagttgaaagcaaggcaggcgacctgtccagagatcgaacctgtatgagaaacaatatgggacctaggtggaaaatagcggagggttgaggttcaaagacgtgtgcgaggagaagggctccagatgccatctatccaggagatatttttggtgcagaatttgattggaggtgccaacgatgtgggctgtgaaagggcgactgaggtggaaccccagcacatcagcaattgtcgttcgccatccaccctttctgaggatccaccatggagccgtccgagacaggacatacataatgtattgggcattgccaaccgcttttcccctgccgatgcataaccattacctgcaagtaccatggtaccccaaccaccggatgattcttccccttgatcataattctctcggtatccaaggtatacttctgtacgggtatgggatttgactctctcccgagccttgttatgacaaacataactcgtcgaacatgtaacaggctgcgggtcaacgatgccatgcgtcatgacattggtcaacaggtgtctcctatgacccatcacaggccccctcaattaatatttgctgtacctatcccttctaccatccgaaacacccctgagcgatcttgcaccaatgtacggagtactcatgctcgtaagcacattggcaaggcgtctctgccaagcaatcacagcgtgacgggctgggggtggcgactcccggagatgacgacgaggcgtcatggaacgatcggctgtcttctaggggcctgaattctgaatctgcaactggcttacgagggtccacatatgcagccatcgttataaatatggtatgtggggagtgaaaaatagagaaagaaaaaaagaaaaaagaaaaaaaaaagaaagccgctaccacagcaacagagagagagacatgttgggatgccgtgtgaataatgtgtgtcatgtgcccggtcacgtgctccaccatatacgcgtacacaacttattatgttcccttgcatatgcgtacactgtacaagatacatatacaaagtacactaacacgtacgacacatccgtggacccttggaagaggaatatagctgccttggtgactatcatctatttttaggtcttagaatctgaaaagttgaagtggtcaaattctctattaatacatattttcccactttgaagccataaatattgtatcaatagtttcatttttgcttggaattgatgtacttatttctcttgtgcgaaaacattgtgtctgttctgtttctctaacttacttggtgcatctattattatgttcggcctctccgccctcacccgacatcggacttcattgcgagcgcagcctccccgaggacttaagtgacggacttaggtgacgagtcttgtcccgagaggctgaggttgagttgttgaatcacttttaacctaaatgtacgggaagcttcatcatgtcccccgtaatatcagatgagttggcaccagatcgttcgaccttccaaggttaccgaggtcgttatttgataatgccgcgcaacatgcggggtaaacgatctatctacctaggtattactttacagagtacgttgcgcgcttctaaatcgtcattcgagtaaattttcaatttgatcaaaggctatttattacctcctgtgcttaacgatgtcgcctcagagaccatcgtttgatgccctacctttacgcaaagatggacctccagggaatgcttgggggatgtttggcgatgaagatcagatgggcatgctcaatctattgaccccggaaaacaccgccgcggctgctcgcgagattgttgacggcgtgcgtgtctcaacagattgggctctcaatagtatggcgaccccctgctttggacggtcttcgttcgagcatatcatcaagaacaaggctccccggatagtcaacgatgatatcttgactttcaacacccagagtagtagtcaatgggatggtttcagacattatggctcaaagcaaggaacttacttcaatgggtgtacccaggacgacatccaaaattccactctaaatggcatccacggtaattccctctgatttccaaacttcggggtttctactaaacctcccttagtctgggccgataacggcggtattgttggacggggtgttctgttagactatgcgggctgggcggcagcgaacgggaaagaagtgaattgctttgaaacccagtcaatcccggcctctgtactccaggaggtagctgctagtcagaatactacattccggccaggagatatcttatttattcgcacgggctggacccgagcgtacgaacagctgtccaaggcggaatgccagaaactggccgactatgcagcacctccagtgattggggtagaatcgtccgaggccaccctgcgctggatttgggatcttggattagccgccgtggcgggagatatgccgagctttgaagcatatccatgccagaatcaggttttctctctccatgaatggttgctagcgggatggggtgtcccgattggcgaattattcgatctcgagcagcttagcaaggagtgccgcaagagagaccgttggacctttttctttagtagcgtgccattgaaggtgtgtatagataaattctacttctgttcccaactgaccacattcatcaggttcctggtggggttgcaagccccccgaatggcgttgctatattttgaccataggttctttcgtcttttttgatcatacatatcatgcggagtacagtctaactctttgggatagcgcggaatgcaagtgggggtctttacaagttgtacggaaatatagtgaaaaatatcagaatgcaccagtcatttccagcccagacacataggtataattagacgaaacaagtcatacaggcgattgattcccttctatcgtaccatttcaccgtggggaagtcgggccggagagataagtgaaaaagcggagaatccggggctttccgtgccggtctgggttgtgtgtcattctacaacgtttcgccagtctatgttgtatgcagatctagcagatctaaacacttccaagacctagcttaaaaagaaaagagggaaatggtccttggaaatgcaggcatctcgcgccaggcagaagatcgctcaaaaaggtcgatggtagcctgtaaccgctgccgttctagaaaaactcgctgtgccggcaatccaccccacccttgtgcagcatgcgtggatgcggacaagcgttgcgtatactcagaggccgagaagcgaatcactataacggaaaggtgaagtcggtctaagatcgtcgaaaagagttaatgttgactctctttacagctactatcgccaactacaatcgcaacctcctgcatcgcgaggtaggtttcatacctacccaggtggtcatctggacgcaatctaaccacccaggatagaaggtagtcacccaacgccgtcaagtgaaccatcgatatccaaccgttactctgaggggccatcagaacgcgacgactggtggtacaaagggacggacaatttgttcttgaagcggtcgggtgaacatcgtacgcgttgagctggaagataatttatttctattatcttgctaatcttttctcagatttcgtgggtgcctcgtctactacacatctcgccaaacggctcaatcctggctccacaaaccttgcatgggatgtgcgtccactttacgatgacccttcatcattgagaagaccagtcgggggctcattgcctcaattaccacctttcgagtttgccaagcgactgttctgggtacaatacgcttacatcggtaccatcttctcccttatcaaacccttggagtttgaagaacggctggatctagtctatcacaaaccacttgacttttcacatcgtgaatcttgcctagtatactgtcaaacactgttggttatttcctttggcttgatgtatagtgtgaaccagtggattggcgaggaaggtcctcccggcttcaaatatttcaagcatgcattacgtttcttgccagatatccacgaagagggctcaattctcttcgttgaggtactatgctatgtggcatactatatgcagaatctgaataggcgggatgctgccttcctctacgtatgtattccttccattagctttccgctgtaccgctaacgacgtcagattggactttctctgcgtatggctatctccttgggtctacaccaagaggtgtctgatctttcaataagtgaatcagatcgcaaccgtcgacgtcgggcttggtggtctgtctacagcttggaccggtaatttgaccaattcccttacatttctgagaacaatacttacacggatagaattctctcggtcaagtctggtaaccccattacaattcacgatgaagacattggaataacttggcctacagctgtggtatgttgccttccatggtatgcctaggtattcgctgatttggtttttttcgatcaagggtggatcaaccgatccatggccatcgaccgttcttattcattatacacaactatcccgtatattgggacggattggggaaggtagaaattcttcttgctttttgtcgcattgccaagctgacctagatggccacatcagaaatctacagaaagaagcctgtatccggatctaacctcgttgcttctgttcagagtatcacaaatgacctctctggctggctgcgacaagtgccagatcgactccgcatcgatttcaacacactcaatacccatatcaaccgagagtctgtctcgatcaacttgcacttctactcatgtgtgaacatgactgcgcgcccgttggtcttttatgtcatccaacggcgactcgacgcggaagcctttggatccacaacagaagactggaaagaaggactggctcccaataccgttgccgtcattgacagctgtatcacggcagcgcgagcaaccactctgatcatggatgcagctgcaaaacataatctcattggtaagcgatcgcaatacaaccccatctcttctgtcatgaaaccatctgattgacgaacattctagctacatatggataccttgatggcgactatatcttctctgctgcactgctgctggttatggtgaatgctgcgtttccgcccaatgaagtaagtgcccgggcaatggagaccgcactgaaccttcttcgcggtatggcagatcggggaaatacatatttggattcgcgtcactcattgctgttggaattacgggcggccattggacctagacctgctgaagagaaggatactgatgtggcaagttctcttgctgcaggtcaaatgggccctgtgacgccaatgaccgagaatggcgtaaatccatatgttctagatccgggtgcggagttagcagcttcagaagagcttacttataactggccagagctgccagatctcccttcttttcgggatatcgccttccagttagatctaaacgatgatccagcactctgggaaggggcattggatcaaatcgacattgacatggacactgactggattgagaatactctaaagcgatgagaatgaatatatatcactcacctcttatcttatgtgctagttcttagttctgatgtagcttatacaccacatcttatcacgatctgcatccgccatgcgactccgattgttgacatatgcttgcttactttctatttgctatttgctatctgcttctttccttgttcataagtggtttgctagctaagtcagagatcgatatttgtatgtcccacttctgcatttactttctcttttttcttcatcttaattattttgaaaggtgcactcctcagacctggcacgtcacatgtgggataaattgatgcctgaggcccatgcaacttatatgaatatctccacaacttcctaactattattattatcattatgtagactacacatgtgcccgctatctgcccctccatccccaatctcaccccgcggcttatcaagctgtggaggtatcggcccgaggaagccgaaataggagtcatcggcccgacacgtgacattcatctatcatttagaggtgtgttgggatatcggcacaagctctgtgagataaatgaatatggttctctcctgaccttctttgtctgttgttatattctttccttttttagaacccactcacatcttcccaactactagtcgcaatgtctgactcagggaagatcaccatctccatcgatcgtggcggcacatttactgatgtccacgcgattcaacctggccgtcccgacattatcttgaagcttctctctgtcgatccttctcattaccaagatgccccgactgagggtatccgtcggattctagagcttgccaccggggaaccacacccccgaggccaaccattgagactcgaccgtattggttgcctccgcatgggcacaaccgttgcaaccaatgccttactcgagcgcaagggtgcccgctcagcactcttcacgacgaaagggtttcgagatttactgaaaattggcgaccaatctcgcccggccatttttgacctatcaatggctcggcccggagtactcccggagagtgtcgtcgaagtcaacgaacgtgtgctgtcgtgccatccttctgctgatagcgcttgcttctccgattgccgcttagtagaaggaatcaccggcgagaatttccgcgtggtgcaagaactagacctcgttcaggtgaaggcagagctccaacgactaaaggagcaaggaattctgtcaatctctgtggcgctactgcattcttacgcatatcctgagcacgagcgtcaaatcggcgagctcgctcaagagatgggattctcggtcactctctcttcaaaccttcaacccatgatcaagatcgtgcctcgtggcatgtcggccgctgctgatgcctatcttacacctgttatcaagacatatattgactctatctcttccagttttgaaggtgggttggagagtcaacagaaatgccgatttgagttcatgcagtcagatggtggactggttgatttccgcaaattcagcgggctgaaagcgattttgtccggccccgcagctggtgtggttggctttgcagccactagctgggatcccaccgagaagactcccgtcattggtttcgatatgggtggtactagcacagatgtctccagattcgatggccactttgagcatgtatttgcctctaaggttgcaggtgtgataatccagtcccctcaacttgatattaacactgttgctgctggcggcggctccatcctcacttggcgtaatggcttgttttatgtcgggcctgagtcagcaagtgctcatcctggtccggcatgctaccgtaagggtggccctcttacagtgacagacgccaatctgttcctaggtcgccttctgcccgagcacttcccgaagatcttcgggccgaatgagaatgaagctctagatacagagacgactgcacgccttttcaatgaactcacacagaaagtcaacattgaacgccggcagcaaggccagtcggaattttccccagaggagattgcacttggtttccttcatgtggccgatgaatctatgtcccggccaatccgtaacctcacggaggctcgtggctttgagacagcatctcatcatttggcatgcttcggaggtgctggtggccagcacgcatgctcagtggccaaaacgctcggaatatcccgcatcatcattcataagtattcttccgttctatcagcatacggccttgctctggcagaagttgtcaaggagtctcaggaacctgtttcgtcagcctacctatcttcacaatctacacttcttcaacgcctcgataacttgtcagcatcagcaaccaaagatatggaatctcaaggtttcccctccactcaagtgcgccatgagcagtacttgaacatgcgctacgaaggttctgataccagtctaatgatccggaagcccgagaactcagacttcctggaagcattccgcattcgtcatcgccgggaattcaacttcaactctgaccgacctgtccttgttgatgacgttcgagtacgaacaatcgcctcttccaaggtgcggactgagcaaagtcccttggttcaactgaaagaagccgatctgcgagatgtcgcgccggctttaaataccacttcagcctactttggccagttgggtcgggtggatacaccagtttaccttctcggtgcattggagaagaattcccgcattcatggcccggctatcattattgatcaaacccaaacaattgtcgtggctcccaacgcagtggcgaacctgctcgatacctgcattgtcatcgatctcaatgacgaaccaacctcatctggaagcgccctgtcatcggaaattgaccccatcaggcttaccatctttggacatcggttcatgtctatcgctgagcagatgggtcatacgctacagaaaacctccgtttcaactaacatcaaggagcggctagatttctcttgtgctctattctcccccgacggaggtttggttgccaatgcaccccatgttccggttcatcttggatctatgcaatttgccgtgcgttatcagcatgagaagtggctaggcaacctgaaggatggtgatgttctggtggccaatcaccccagttgtggaggcacccatctgcccgatatcacagtaagtcaccttcatattgactacatcgaatactaatatatctataggtcattacaccggtctttgaccgacctggtggctccgagatcatgttttacgtggcttcccgtggacatcacgctgacattggtggtatattacctggatcaatgcctcccaaatccaccgaactgtggcaagaaggcgccgccatcgaaggtgataagattgtcagtgatggtatcttagatgaggcacggttgatcgagttgctggtcacaaagccctcgaaatatcccggctgcgttggagcacgctgcattagcgacaacttgtctgatctgaaggcacagattgccgccaacactcgtggaatcagcttgattcaaactctgtttaacgaatatggaactcagaccgtgcaaaagtacatgtacgccatccaggcaaccgccgaggctgcggtgcgcaatcttctcaaggaactatatcagaagttcaatggccagccattggagtcagtcgactacatggatgacggtacccccatccgattgaaggtcaccatcaacggtgccgagggatcagccatcttcgacttcgagggtacaggccctgaggtttatggtagctggaacgctcctattgccattactcactcggctattatctactgtttacggtgtatgatcaatgcagacgtgccactgaaccagggatgcttggcgccaattgacattcgtgttccatcgtccagcattttgtcaccgagcaagactgctgccgttgttggtggcaacgttgtgacctcacagcgcattactgacgtcgtgttcaaagccttccaggcttgtgccgcgtctcaaggctgctgtaacaacctgaccttcggtagagacgccaagctcgattcgtccaccggtgctgtcatcacacctggatttggatattacgagactatcgcgggtggcagtggtgctggcccaacttggaggggtgagtctggtatacaagttcatatgaccaacacgcggatcaccgatcctgaaatcctggaaaagcgctatccgacgatgctccgtcagttcgctctacgtgagggctctggcggccagggtaggaaccccggtggcgagggagtgattcgcgacatcgagttcctttcaccaatccaatgttcgattctgtctgagcgccgtgtccatcggtcttacggactggaaggtggccaggatgcacagaccgggttcaatctgtggatcacgcgggatccagatactggcaatgagcgccgtattaacattggcggcaagaacaccgtctcaatgaagacacacgaccgggttgtgatcaacactccgggtggtggtggctggggggctgtatgaataagttgtatagcgagcatgatatttctagtataccaatctcaattaaatacagttagagatacaatggtgcttttttggcctcatgaataaaatcacaaaatttccttttcacaacttagactttccaaatactggtcgccacatttcattcattagtcggctggtgtttaccatgtctggtcgcaattggtcgagggaagagactccaagcatcttcatggtgatttcaagttcttcggcgatgactgccaatgtgttagcttggaattgatttgaataccggtcccaacttactatctgtacatctttccactccttcggcgccgtatgccgcgagggcatagtagtaaggccggcccactccaacggcggtcgctccaagacacaacgccttgagaacatctgctccgtcgcgaagacctccatcaacaaacacctggagcttgtcgaaagcctccgggtagtatgtgcgaatctccaggagcgtcatcaatgagcttggggcggaatgaatctgcctgcctccatggttgctcaacagaattccctgcacaccatattggacggccagcttcacgtcctctacactttgaacccccttaagaaccagtggcccaccccactctgacgaaatccagtccaaatcttcccaagtaagaccaccatcgaccgagccgggaacctggcgacccccaaatgctggcgcaaattcgttctcaccgtgagtgtctcgtgcattttcggtcaaaccagcgtcgatattttcttgtgcttggaggtagcgatcggcagtacgctttcccagggttgaagtgtccaccgtgacccacaagctttggtatccggctgccttgactctttgaatgagtgacttggcttttgtccgatccacaggcacatagagctggaatgacaagttcgaagggctttggttgccaagtagccgttgctcgtccagatgagcatccatgatctcctcgagcggcttcgtagatgctgtactgatcatggtgtgcagtcctttgcgggtagctcctctcaccagcaagggttcagcgccagggtgtgagctgcccagtgtacccatagctgatacgaagaagggaaactgggaggtatgtcccaagatgttccttcgggtgtccattgaatcaacacttctcaagatccgagggcgaaagttgatcagagaccagtcatccagattggttctcattgacaggcccgtattagctgagcttgatgcgtaaacccatgacttctccgacaggacattctttgcgaccttctcaaagtctgtcgtggtgacacatagagaagaatcgggaattttgttgattgccatcttttttatcgtagtagcttaggatatgaagcaaaaaaaaaaaagaaaaggagcatggaacatggaacatggaggctaataaagtatagaagatctgataacgggcccgaagtcggccccgatcggctactcattccggctcggctatgtccatttggggtaagatcaattgccgaattgttatagctcttgaatatttacggagtaaatgtagacatatacacattctcccctgagtttccggatagtcatctctttttgtctatttttctatatcggaaatgaggtcccgtatttatcgaggaacgactaccacgaaatatgtttccatatgggattatattctcaaaatggttggacaatgagcatattcatacgtcaacattctcttctgcgcatttaatgagggacatagagtcgtagccgccatttttattgatgtagatgcgaacatggccattttagaggaaattagtaactaattgaagagtcacaaaccgcagatttattgcaggatctggtcccacatcatctatccctggcttttcagatttttgcgataatgtctccagctcgtaaacataaaacaaatcgacagcacgagacccaatgacgccagtccaattcccatgtacagcgcaccgcggtaaccccgtagtacattgcgccctccatcattgacatgcgtttctaccgtgcctgcaaatcctaggccaagggagatagaatagttgaccgttgtagcaacgagggaagcggccagtccttggtggtgccgaggcatggcgttgctcaatatcagggttccagagggaaaagacatgtccctaaaggcgaatgattaatgacgctgaataggaccaaatctaatgacgcaagaataagaagacttacattccccaggaggttatcaagctcaccacaaatgcctgcgcccagtaaatttgatcgacaggtacagtggcgaagatagagaggcctgcggtgaaaaatgccattgcgcaaaacatgatgacgctgggtggcaggcgaccaagtaggaaaccagtgatcaaagctgccacggcaccagaaatagcggccgctgaccatttggccgtggccaacagtggagaatcacctttgatgacttccatgaattgatagaagtagtagatgataattccaaaactcgaccagccggctgcgatacacccaagtacccacgccagctcagtagtaaagactgaccgcgggagcaatggacatagtgccttgcgttcgattaatgtaaaggcgccgaggcaaataaaaccaactatgaggagaacataggtgtaagggttcttccagcccacgagcggggcttgattccaagcaaagttgatcagcaccaggcctgaaattcctgcagtggcaccaggtagatcaagacgttgccacaaacgaaggttgtcgtcgaatttgggttggggggtgtgggggatgacaagccatcctatcaaggccatcattgcacacgcgattcccatcacccagtatccccagggccaccaaacaagctgagcaaagatagaagagaaaacacctcccacgataaaccctccaggcgctgtagccccaaacgcactgaatatcatttccttgcgtaggcccggccgatatgttcttccaagaattgcaattgcattaggaagtaacatagcgggaccaatcccctgaagggcacggcagcaatcgaagaatatctgattcgaccagacactgaacccagccaacagtgaccagatactgaaccaacagaaaccgatcacaaacatgtttcggtgaccaaagacatcgcctagtctaccagcaacaagaatgaaagtgccaaccgttaagctgtaggcggctgcgaaccagcttaaatcggcaggatttgtggtgccgaagctatcgccgatgatatggactggagcaatggagatactaagaccagcttgagtcatgaattgtgccatacacaccacactgacgaagatggtttcttgaaaaactgatttaggcggttccatttgagactgagacgtttccagtcgggtcaaagtttcgtcaacatcattttgtgtgggcaccttgtttagattgatatcgttctcctccgagtccgacattgaccgagtgcgatgattaagctccatagcgaaagtcaaatacgcaccaaagaagaagctgaataaagatagagacaaaaataagagacacaatcgaaagaaaccaagctggctttgtatctgatccaccaaagtggaatgccgacttcaacatcttcccgtcgggcccgatccgacggaattggagatgtcactccgaatctgtcaacttctgttatgacagactcattgatcgtagggcctaatctgtgtaaactggaggctaatggtatatgcagcttcctattaataggaccaacaattagattcaagctgaaaaagcattgatctatacaggtacctacatagatgatgtagacatgtataggtgctgaaaagaagtacacaaagaactcctttagcattttgatcgaaagcattgccaaatctcaacttgaaatgtaattgaatatagtcccttgtaagctctgaatatgttaaatggtatacatctataggtggatgttatggctatacagtggatgctccaggctggatgagggggtgcttagtaagtatcacatgcatggagctgccccaggcggccctggttctttcaactttcgctttcgctttgttcgctttcttcgcttctcttttgcatcttctcattgcaagtctcaatatgtctgtcacgatacccggttgatcagccatagggcttcttctctaatatttattcccttctatctccattgctgcatctctgcaaaccacccaagaccgcgttatcgcatcttccccgcgaacaaaaaaaaaaaaaaaaccaaaagacaaaaaaaagtgacgtggagtccaaggacacggtattgacctccatgccaaaatcaccacctattgtgtttattgccaggtgaatatttactccgattgcactgcttccgctactcactagcattttagacatggtgcccgcctcgatgctgcagataaagattggcacttaacctctccaagccctttcgatccgcccctttcctacggtggatggatacagtctcgggcacttggtgtacgtataggaagtctgctaagggcccgacagttcaccggggaagatccagagagtcagcgcagccatcacccgacctcggataaacaggcaaaacccacccccgcatcttcggacctgtcccatcgatataacgtcattgtccatacctctccttaccttcggtgtctgcaaactgcaataggggttagtgctggtattcgccaagcctcggacacagaagcatccgaaacaactagttcagctcctactgcccccacggtttcatcaatccctgaccagcgatgcctgcttcgcgtcgacgcatttctgggcgagtggctatcaccggattattatgaccagatcacgcccccgccgggctcggacagaatggtggcgtctgccaaaggggaattacttcgtcgtgccgaggtcatcccagccaccgctggtttgacaagggcgttgtcgggccatttccctggcggttggcgcagccagtctcatcctacctcgccggatgatgaagaccgtcgtttgcattccgcaacatcccagcgtcagcgttccaccacccatgacactccccagaaccctacccatcacaagcatgcaaagaagtctctcagtcggctagaaacggacctgccgcctactgtagacgcatattacgtgcccccaactcctagctatgccatttccgcgtcggaccccattcctacaggctatgttgctcatgcacgaaacgcatgtacgaggatcgactaccagtgggacagtatgcgcacgccttattggggcacagggggcgagttcggcgaggaatggagtaccatgcatgaacgagtgcatgatggatttcagcacatgattaactggtaccgggaacaggatctacctgaacacggttctacagcggagtcaagcaaggtaaacgacggtaatatacaaacggtcctcgttattatcacacatggcgcggattgcaacgctttgatcagttcgttgaatgggcactcggtcttactcgatattaacacagcttcactcactatggctgtgcgacgcaaccgtgtcaataaacccgcgcatgacatggatcacacgcctaaatccccagaccctgagaaccaatcggtgtcactggaatactccttgcagcttgtggcgtcgaccgatcatctgcgcccgggaatgaacccctcacagctcacctcgctgccatctccctctgtccctgtactttcaccgcctccggtccctgcctatcggaatcgtcttggctctcgttcatcgctcctccaagaaacatcaacaaatggaccacctaatactagccctcggacatggaccctggcgatgcgcccggcaactagttcaagtacttctcaaggtgcctctgggctgtggaactcgatctcgtcgcctaaagcagatgcagaggacaaccttgtgccgaacttcggtgatcgaccggtcagtcaagattccgccctctctgataggtatgacaggtctgcggatcttggctggacgaagcagttaccacagcggacggtgtcgcagcgtggtttatgggggagtgctcagccattggatcgtgaatgcggatcgaagcggcgatggacggtggcagaacagtagctgtggaatgattgtttttattggattttaggatacctcttgcatggcgttgtggtctacttctaatttttttggcttttcgatattcaaaatattcccatgacgacaccccaaccctcaggcatctaccaggcatctaccaggcaccggtaccgtggcttcccctcacgtctgtctctccgtctctccgctctttgctctcctctctcctctcttcctttcaagtatctcctcccaactttcccataacatcgagactttcatgtcaagcatcggaacagacggtctttccgtcacttattcctctgaccgaactgggtctccggatctacgcttgatccactataatgatgtctaccacgtcgagtatgcttgtctctccatccctttctccccctagcttcataaacttcaatttgggatgatattaaattatctcgtatagatctggctctgcagagcctgtcggtggggtgtctcggttccaatcccttgtaaatcactaccgttatcacccacagttcgccgggcagcccgatatcctgaccttcttctccggcgatgctttcaacccgagtatcgaaagtacaatcacaaagggcagacatatggtaccgttcctcaacgctgtgggcaccgatgtagcgtgtgtgggtgtgagtatggcaaccagctgcccgtcaggcctacatacaccgctaatctgagcacccacctagaaccatgatctcgattttggagtcgcccaattccgccatttggccagccaatgtcactttccttggctattagcgaacgttcttgacccagcactaggggcggataccccaatagccgactgcggaaagtctcggatgttgacatccaatgggctcaagatcggtgtgttgggtcttggagaaagagaatggtatgcgctcctagaatgtatcttcggatgctttcattcctttgcttactcgggtctaccttaggctcggcacaataaactctcttccgcctgatctgatctacaaatccgcatcccaaacagctcgagtgcttgcgaaacagctccgagatgaaggagcagatctcgtcatcgctgtcacccaccaacgtgaaccgaacgactacaaactggctaacaacctgtcacctgatcttgtggacatcattctcggaggccatgatcatttttacgcccatgctgttgtcaatggaatccatgtgatgcggtcagggaccgacttcaaacagttgagttacattgaggctttccgcaaaccggacggcttgcctggttgggatttcaatattgtacggcgagatgttgttcgctcaattcccgaagatcctgatatggtggcgatggtgacccgcctaacttccagcctcagggctaaactagaaaagccaatcggatttacggtcagcccgctcgatggccggttttctactgtgcggcagcgtgaatctaatttgggaaattttgtatgtgacctgatgcgcttctactatgcggctgattgtgccatgatggcgggcgggacaattcgcggcgatcaaatctatccgccaggaatactgaagctgaaggatctactgaactgcttccctttcgaagaccccgtggtgttgttgcgcgttccaggccatgcactgctagctgcactcgagaatggggttagccagcttcctgcactcgaggggcgattctcgcaagtatccaatatcaagtacgggtttaaactggatgcaccgtcggggtcacgaattacattcgcccgtgttggcggcgagcctattgacttacaacgtgactatcttctcgccacacgcgggtatatggcccgaggaaaagacgggttcacgtcattgcttatccaatccgaaggaggtgatgtggaagagcttgtgtctgaggaaaatggcgtgctcatcagtacaatcctacggcaatatttcctaagtcttaaagtcctcggaaaatggaaccgctggagcgccagcttaggtcggcactggagtattgtgcatcgtaacctgcatggtgagggctggctgaagccagcatctcctaaaaaagagaagaaagcatgcgacctgctgaacccgcggcctgcactccggcggacagcccggtcagcatactactatggtcgatttcccgaagaagtcgaacagggcaccaacgttatcgccggggacgagacgaatggtaatgccatggactccgactcagacgaggatccagagattctcacatcctcgcgaccaaccacaaattacgtcactcaaccagcgaaatcatccgctgaagaggagtatcttctacaaattgcgcggcgagttgtccgaaaatggatgcggcacgcaggtctgcagtgcaggacgttgaatactatggacggcgaaggggaattcactccggcctggacgtcgggaatctctcctcgactagagggacgcattgtggtagagtagacatgctcctccacttccattccgtctttctcggattttctggtttctcttttgggtttccttttgttttcggggattttcttgtcttcatcatatttgctgttctctattgcatcatgcatatgcgctggatggcctggcgtttccggctggacggaatgcatcgataccctgaatgttttcgatatattctattcagtcggtcttcttcttgggaacctcctttcgtaacaagtagtctcctcccctccaagccttgtaaactccgtaaagaccacaaaatggccagacgtcccacagagcacgtttgaccgatcctttccacccactctcgaactccccccgatgtggaccagggagatcagattcatgcactcggaccttttcatacaaagacggaaggtgctgtgcatggtatttttcccgcagagaatcataaccgggcttgttatagatggaccagaactcgtcctctgtatagtaagtatgtgcatatagccatttctttcctccaagactgtggaccttatgttctagccgtcgattttgagccacaaaaccgacctcatccgtggtggcggcaggcccccagattccaaaattgaggagtcgtgtcctctgtgcatcgactcctttgtcgtcatctgccggctttccttccaaaccaccggcacttcctggtggtagcggacagagccaaagcggatattggccaaagttttcagggcggtccagccagtccaggaactcggcagcagtggatgttggtacaccgacgtcttggataatatatcgacgcgcaagcccgctgacgtgtagggcgtgatacatcaccttggtgtgcatgaatcggttgaggagccagcgtgtaagaaaggtgaatggaacacagaagtagctaaaagcataacgcgcaacccagaaaccacctctatcatagcggaaaaggtagtcagtgagaggaatgtagtccactgcatctggcatgtgaggagaattctctcggtcggagatcttggattgagcaatctgttcaacgtgcaaatagaaccaatcgtcttgtcgccgagtaaagcgccgaggctttacattagaagtctgttcaacttgtcttccagcacaaacgacgatcttgtcccttgcatagacgattccgtccagatattcagtgcttggatcagcactagcctcttcaaaggcacgcaccgcgtcctccatattggaattgacatagtatttcagttccaccagtggcagtgaatttttcaatcgaatttccaacaaggtgaccactcctaaggtcccgaaggaagatgcggcgccccagaacaagtccgagcgtcgatccgccagttccgatcccatctcgacgcggtcattgtatgccttcaccacctgaccatctgccaggaccatttcaatccaattgactgtatgatcgaagaatccctcgcggaaagaactactctccccggatgtccccgagaacccgccgccaaccgagatgttggggaattcgacaacaactaaagggaccaaatcatgggccttggtggcagccactagagcatccatagagacattgggctcgactgtagctgtacgtcgagcgacatcgatctcgaggacgcgggtgagaggttctgtgctgaccgtgttggagagagatcggttggagggccgagtactgttggtagcaccatgatatatacgaaatggttgctggcgactgtggaagtccgctacccgtgctgagatttcttgtacagcggcagtatgatccatgataaataataatcaaaaagaagacaagggaaagatgagaatggaatgagaatggaatgaggagaatgcccgaggtctccgcatttagagccggacgagtgagtgtgagatgactacatttactattcatatgtttgtacgaaatcaaattcagaactaaaatatcggtatcatcaacataaaaagaaaggaaaatagaaacaaaatagaaaaaccgagcttattggacgccgactgggcgtgctccagcgagattgaccaccctaccccctccagctgctccaactactgtaggtgctcgaggctgtacccaaccgggaacactggaatcatgactctcacgtccagagatggtctgccagacgttggggaatcctgtgggcaagatgcctttgattctggcaccaggaacggcaaatcgaggctcacgatggagaaggtagccgcccatcagcccttgtgtaatcaacgatgcgaaaatcgattcgatctcttgcatcatggatacatctgcctctgtcctgtcgtcggggtcatacgcatatggatccagttcgtactcgccataattctcttccgggtctccgtcgatcagttgacccggaggattgggctgtgatcgcccttcttcggtgtaaaatccatccggagctaaaaaatcaccatatttttctagtatctcttgatcagtggcggggctggcccttccatctgccccttctaggcgagcgtagtcgagatcagtaggttcggaaacgacttgtgatccataaaagttggaggacgccatagcatttgccgggccatttccggatgctgcgtgctgcgcttggagccatcgtgtcgccacaacgagctttttaagattgaggattggtggaggtcccttgtgcgcctgcgcctgcggacctccgtacgaacctccatacatgaaaaccttgcgtgcaaaagatcgccatacaagaatctcgcatcgatttcggagggtaaacagaattcccttatgtgcaaaccactgagcagtcggggagccaaagaagagatgttgtcggaaagccaggtaatctcctcggacaatcaatcgacacagtggctggaagtgttccgctaatccttgtgcttctggtcgtcgaaggagtgcctgagatggaaatcgtcccaagataatgttgcacggaatgaggtatgagaggattaagtgtcgttggcttatggcctggcggtggcattggtcataggcggcctgcaaagcgatgcgggcgggaaagaagaggttgttggcgaaaaggtagcgcccgagataatagaggtaggtgacacgctgtgaggctgggaagtaggccaaggggggtgattgggcgctgatgcttgcaaacatttgctcggcgttgcgtagtttgccgcactgtgttccgtcagcatcaagattcgaagggaaggtgagatattcaaggataggcctccgtacctggaagagcaatttgaggcagagattagccatgaggtagataccgatgcgcttgccctccggcttaccagtagggccgggagtgccggtgcgatcggtgaggcacttaatgaacgcttcgcgcaccacgttggccgatttttccaccaaagttaccttctcgatgctctcgtcgtgagccgccagaccctccattcgtcgaatatgcgcgatcaggtccggtcgacgatcaaggcccattgccaattttgccagcactttggacaagtagagaaccgtaggaagaacgacgacacccatttgactatctccgagtgcgagcacgcattgactgcagttaacgatacggtcgagtcagctttcaagcccaaagacatgagtagaatcctcgaccggggacagagtgcgttcagaattcttcgcgagggcagcaaaacttacttgagcagcgccttcaattggttgtatgtttccaataggttatctgtgttcatatcgcgtaggaatatcaggtagagcttgacgaaagtcgggaacgccgtccatgagctacttttggatcgcggtacgagaggctcgcatcgtcgaagaagttcggcgtcacttttggggcccgggccataattctgtcgtagttcactgatcatgcgctggtaaatgtccgagagtggcggctcgagctgaagaaagtcctggactttggcgccatcgcgtttctggaccaattcctgcaaactgccgaggaattggtcgaggacaggtgtttgactcatgttgaaagcgcgagatactcggttaactggtagagtcgcaccagaagaattaatttgattgaacgatcattgtgtcgtttggcattctcaacgttcaaagaaacccaactggcgggtcacagagtcaagaggctcgtctgttgacggcattgatggcagaacccgtgaccgccctttgtatacaagtgtccaacgaggggagttgattcaatttcaattctattcaatttcgtgaagacattgggtgctttagtggggattcaatcaatatataatttatgatagcagttctgatttggttcaaatggattggtgccacttcactcggattgtctttctaccatctatctatgctccgtataatatgcaacataggatggatatattattatttccatagaagtcatggataataggtaagattttcacctacttgaaacacagtgatatcccagaaaactagacttctttgtcagtcagtagtatagtccccatacaaagccgggcaagatacatacaccaatatcacatgggacttccttacgtggagactattatggagaatatctacttctagcatagcatagcatagcatgacatagcatagcataagttatctaagtatagtctacctccagggctcgatactccatacgtgcggccaaaccaggatccttcctatgatgtcatataacttggactaacgatcacatgtgaaggagagcataacgtcacagagctgggaatgggaagtacaaatatttcgattcttcttgtccttcccaattgatcctaatttccattcacgcaagaagtatgggttctgagtcttttctctcggcgctctcggcctttatccggcatccattcgtagagacctttacctggctctacatggttatacaagccgtgttggtttacatattttctcctatacccccgccccctgcagctttgaatccaaatcttcctcgaaagagagtcgcggtcattggtgcaggcctaaccggtgtgtcttcggctgcccactgtgttggcaatggcttcgatgttcaattgtttgaatccagacccaaagaacaaggattgggaggcatctggagtgtgagttttcttgatttctatttattcctagttaaaatacctgctaatacttttacagagagtcaattccacctctgcattacaggtccacagcgtcatgtaccgtttccatccctcggtccagttcgacagcgcatatcccacccagcaacagatcaaacagcaaatcgttgatgtttggaagagatatgatctggaaagacgtactgccttcgagactaaagtcacgtccgtgaaaaagaccgagaatggccagtggatcatcaacgatgacgaagagcagtatggccgcttcgacggcatcttggccacggtaggcgtttgtggagatcctaaaatgccaccgctacccggccaagaaaagttcaagggccaaatctaccactcctccgagttggatggcacaaatgccaaaggcaaaaaggtgctcattgtgggaggcggtgctagcgccattgaggccttggagttcgccgtcaaaaatgaggctgccgagattgatgtcctttctcggtccgataaatggattattcctcgcaacatactggtgcagtctctccttgcatgcaacatcttcggtcaggaaacatcactttcgtggattcctgaatggttgctgcgcaagtttttctatcgtgatcttcaagacattgcgccgacagacaagggaatatttaccgggactccgatggccaacgacgagttgtttaaccagatccgcgagggcaaagcccactggttacgaggtgacatcgtttctgtggaagagaacggtgtggtgttcaattatcgatctaaaggcgtcccaaagggaggacctggccatgaacaactggtcgagggagatatcatcgtcatggcaactggtttcaaacggccttcattaacctttttgcccaatgagtgtttcgatgaaccctacggaccgcctaattggtatcttcaagttttcccacccaagtacccggatatttgcgcaaacaatagtacctacgtcgatgcgattggtacagtgggcaatatgcatattggaatctacacgcgattccttctcatgttcctaaccgacccattgaccagacccactgaaatgtggatgaagacctggattgacttcacaaggttcatgaagcgtctggcgcccacgggagcatttgacttctttacctatgctgaactaatctactggtacttcttcgtccttgtcgttaacccgttccgttggaagtgggcgttgttcgtgttctttggtattggccgtggcttgcctatgaggtttgtggagcaagagaactcgttccgcagggagctgaagaaacagcccgaatcaaagaaagctgattgaattgggttgctatgatattcactcagtgtcatgatgaggatacatgtgcattgaaagctgggaaggtcatggcttgaatggaaatttggctggttggttcggcttggaagacaattgcataagacacatgtattgtatgtaaaataaaagcactaagaccgcaaagtacgcctgggccgtgtcctctccttcttcggctagcttagccagaagtctgttggtgtgttcccgcgctttgtccgacagcttgtcgatcttttcttatatattcatctgaacgtcaggatcgggtttccagttagttaggtgtgcaacttttactacataggggtatacggtaaaataggcgagaaacgcaaggacagacatagcgctcacgttcaacaatatccacctgaagatagaaaatcaactccatcattgccctttaatttctggaatcttcttctccatattgtaagcccaatttccccctcgcaaaaagcgatcggggatataacgcttctcctctagccagagtataggccatagcaaagtcacacccaggagacagaaaaggcttgcaatgagatgccaaccaaaaataatccaatacccgatatgcggcatgataaacttgacaaactccgatgtttgatatagatcttcttgcttggaaatgtagtaaagcttgtggtcgccattggtcgtagcatcgcttttgaccgaatcgtacgtcaggtccaagaccgtagtgagagtcaccggagcgacatggaagggaacaagccagatggtgaagatctgtgacatattcacatagagtttgagtttatcttcatcaaaagctaaagaattatcagagtctgaagtcaaaattatgaagtccacaaccttagaagtttcctgttgacataccaatagaatggatctctagctcgatccggggtgacatgatcttataccattgaaatatctttgaaacccaccatctgctaccttcaaagctgggcacacggcagaatggatgagtaaaggatacattgttggtaaaataccggtgaaggacggtttcttgaaaagatggcggcgactgtgttagaccccggataacggtaggtatatcagccactgaaggaattagctgatgaatccaaaatatcagatcgataacgcacctgggttctccattttggtcaaaacgttcaaaggcgttgttggaaaagaaagaaagagaagatataaagaggtagttaactagcttcgggtgatacggtgacgtcatgttcgactatccaggtcggggtttaacacgtgaatctcgtcggagtcacaccggttggaagctacgccaatcaaatgagttgcttttaattacgtgacctcttctttcgatcgatgtgacataattcatagagctcataactatcaaaaattgtatttctgccagccctagaagggtacaccagatgccggttttctatcggcatgccgagtcattatattccggcggtgagacgtagaatataaacttccacccgtggacagctgtagacagtagaccgagttgatccggtgagatcataccattcgatatatgtcgtagaagtagatacatatatgcattggtcaagatggaccttgggtaatcaagaaaactccaaagtgattgagttccagaaagaaacgcctttgcacatgggaattgccccctgcaaccattttttaccgcttccagctgtcaaccttctttcgtcgcttgtcgaaaacctggcccatgccgacaccatcaccgcgttgcccgtcctcgttgcggactcgcttccgactcttctcgagtgcggctccgttgcttttggatctccgggtaagacgttcgatgttatccgcgccttcattaagccccttccattcatcaccaccgtacgtggtgtcctttccgcgacctcgtttcgccaattccttctttgtctccttcggcaatcggacaaagttggtctcttcgtaggtggtacgctctgcctcgcgctctcggtccttctttgacttgaccgttcggccaccatcaatgattgtgctgccgatactgggctcagccatgggtgcggacgacatttcagcgctgacaaattcgtcgatgacgttcgatctaatgggtctgcggtcctggcgttcgcgacgctctgtcgtaggcaaggaagttggcatgattctcgggggacgataaatgccgtctccgggactctcgacagcacccttggagggacgggccttcttctgctcggccactcccttggagaaggcagagacattgggccggtacgccatttcatcgatgtcctcctcattctcgctaccgtttacatcttcgtcttcatccgatgatgcttcgctgcctgatgtcgcagctttgcggcttttcttggtcttggtcggctgagccttctctgtccgctccgcatcctctgcagctttgatgaccttgtctatctggtacttcaatcgtccttccaaaggacggacaccacgctcgaggaatacccgaagctcaatcaatttcttgcgaatatcatcttcgagggagttgtctgtagattggctcttctcttttggggtttctttcgctgacacatttcgcagttggaagataatcagaaatacgagattttgcaagtaggaaagaaggatttcgctcttggtgtcgaggagagaaatgccgtctttgggaggctcgatcgtgacatcggagggcgcatccttgtgtggcttgggtagagaggaggcagttgtcgacagacaattattcagagtctctagcaatgtcggtagactttgagggcgcgcagacgcctgtgttggagccatgattgaaagttgatggcttatagagaacaataattcgcgaaacaaaaaaaatttggccgcttcgacgataacgccagtcacgtgtgataaagacaaggcaccaaggcactcttcgatgatcgatcgtcattgccagtctgtcactcgcagttcgcattttatctcccttcgagtatcgcgagtttctcacggatgagaacgtgattttctctttctatggtagatgcttgttgtaaacaaccattttttctttcacaatcacccattgacacactagctctactcctttcctctccgaaacaagccattgaggttggtttctaggctttcaaaagtctatagaaacacccaacatgcggttcgccgatcgagcctttcttctctcgtcgaccctactagcaatcccttctttgactacggccttttatctgccgggtgttgcgccgacctcctacgacgaaggacaagcagttccgctttatgtcaaccacctcacccccagcctctctcgcgatgaccagcttcattcggtcttctcatatgactactatcatccggcttttggattctgccgaccagcagatggtcctaaagatgtgagggaatccctggggagcattctattcggtgaccgcattcgcacctcgccattcgagcttcacatggcaaagaatgagacctgcaaatcgatatgtgcagaggccaaattcgacgcccgcagcgcaaagtggaccaatcgacgaatagctcagggctacaacattaactggattgtggatgggctgccagccgcgcagttgaactatgacggcgttaccaagaccaaattttataaccctggcttctctctgggtgagctagatgacaatgggcaggctctgctcaacaatcactatgacattgtgattgattaccataaggtgggctttggcggcaaggataaatatcgcgtggttggagtgcttgtccagcctgagtctcgcaaggactcccggaatttagaaggcggggccgctgaatgtggtaccccgggcaatgttctcgcgctcaatgaggacggcgagaccacagtcacctggacgtatagtgtgtactggaaggagtcccccacagcctgggctacccggtgggataagtatcttcatgtctatgaccctaaaatccactggttctctctcatcaactcggctgtctttgtggttttcctcgtgggtatggtcagcatgattctagtccgcgcgctcaagaaggatattgctcgctataacaggctggattcgttcaacctggaggatttggatagcacttcggctgcgatcgaagatggagtccaggaggattctggctggaagttggtccatggcgatgtcttccggtgccccgaatctccgttgctgctgagtgtgatggttggcaacggcgcccagctatttatgatgactggtgtgactgtcggtgagtagtctgactcccgctcttcttctctttgtactgatttttatttgtagcatttgccctgcttggtctcctctctccttccaaccgcggattcctggctactgccattctcctaatttccgcccttttcggtgggatcggtggttatgtgtcggcgcgagtgtacaagacatttggtggcgattcttggaggcgcaacattatcatgacacctctatttatacctggcattatattcggtactttcttcatcctgaatctctttgtttgggccaagggatctagcggtgccgtaccatttggaactatgttggcactggtattgatttggtttgttatcagcgtgccattgagcgtggcaggcagttggttgggctttaagcaatcggtactatcaaattccaatcccgttatccagacattccgatgactaacttcatttcccaatagccgcttgagggtcctaccaagacgaaccaaattcctcgacaggttcctccgatggctggtagcctgcgcacaattccatcgattctgctgaccggaattctcccctttggtgcgattttcgtcgagttgtactttataatgacctccctctggaccaacaagatctactacatgttcggattcctgttcctctgctacggcttgatgatcattacctctgcggctactaccgtcttgctggtgtatttcttgttgtgtgcagagaactaccggtggcactggcgcgccttcataggcgcgggtatgaccggaggatatgtctttttgaatgcgctcattttctgggcgacacgggtcagctttggtggattaacgggggcagtgctttatgtgggctattcggcgctgatcgccttcattgtgtttattctgactggtatgtttttgttcccatgtcttgcggatgggcttcttttgctgacttctctccaggctccattggtttcttcgccagttgggcattcatccaccgcatctatggctcgatcaaggtggactaaaggttttgctattggtgtaacatttagccttgcatttttggtcacgagagaagacataccctgttcttgtgtctgtttttgtgcccttcttttctttccaaaaaaagaatcgttctcaatgcttggagaggtctcatggcagatagatagttgtttgatatggagaaatgtatatacgcggtaatgagattgtctgccaagcccagcctcgggatgttctggacctccgtcctttctcgcctccttcaacctcttctctatcttttagaaactgcatttcttgtattaacccccttattatatctttcctcttacgtcgccggggccccccttgcgcagacatactcagccacaacccagccacacatcccacctgtttctaccccgcgtcaccactccgggctcattgcaagccatcactcccagatttgttttgaacttgctcttgatactgttctagagaactattttttgatcatgggaaagtcgtaagttctaaccatcctctcaccctgtttgaaatggcggtggaacggactccgcggatctcaggatgcgcgtcatctcgggagcaagccagtaccaaaggccccgtacttttggtctgagaatcacgctgaataccctgcctacattcaaaggagaaccctgcgctgaccctcgtgtttcacattctacagtcaatctaagctttcaccgacgcagctcgatgagctgcaaagggcaacacatttcgataagaaggagctacaacaatggtataaaggtatgcggatatatgggaaacatacgaaacatcaagtctcaagagcgatcgctgattatgggcatgtctaggatttctcaaggactgcccgtctggtactctgaccaaggaggagtttcagaaaatataccggcagttctttcccttcggcgacccgtcatcctttgccaattatgtttttcgcgttttcgactcggacaacagtggtatgatcgatttcaaagaatttatctgcgccctttccgtgacttcgcgaggcaagatggaggataaactggattgggcattccaattgtacgatattgacggcgatgggaaaatcacctatgaagaaatgctggccattgtcgaggcgatctataagatggtatgcacaatgcagttcgtgaaatcacgatacccttaaaagaactaatgagtatacaggttggatccatggtgaaactccccgaggatgaagataccccagagaaacgcgtacgaaagatcttccgcatgatggacaaggatgaaaatggcagtcttgacatcgacgagttcaaagaaggcagcaaacgggatgaaaccatcgtcagtgctttgtcgctttacgacggattagtttagattgcttgggcgaatactggcgcaatgtgaggcattcttttttggacgggcgagggggttgcattgcatattctctgtcttatctgttttctgtttctttactttttttttctcctcttgtcatatttttgattaccccctcatatcttttgtatatttgagacaagtacaaccttggtagtgaagtgtatgtatacggtagtgtctgtcaacttggctttgactttgatcggactttgacgctgtgttcttccaaagacgacaacctcctttaggcagagtgggaatggtgcgctggctttgataaggatcgaaccagtccattgtcgcctcgtatacggagtatagtatgtcacatcaaaatcactcaagtcggcccagcagactaactaccagctcttctccattctatctggaattgatgtacaagggtatcgggaagacgcaagagccagtccccggcatgcagggcgcgatctaatatactggaatgagcaaggcaaggaaacatgggaaaggaaatatgtatcaaaatcatatcagaaacaagaagaaaagcctgttgatcagatgatcaaaaaatagaagaaactcgtgagacagcgtaaagaggaatcaatatagatcaatatcagcccagatcaaccacatgctaatgaaacaagcacgaattgcacgaggtccggggtgcacggcagacagctatcaagcctcagaagcagttgcgcaagggacgagcagccttctgacagtgggttaggatcatcggcgatcaaaaaaccagctgctgcgcttcccgggcgcttcttgcgattgtacgcccgcaacgttcgaattcgccggcccgtcaccacccccgcggagtggcttcgcgatgcgcgatcccccgaagctaaaactcgcattcccatccatgctcggtaagccgcgggtggaaccttgcttcgctgcttccagacgttccttaacagcggtgagttgagcttcgaatctatcagcgtagttagtatcgagtatcaacaagcgaaatcagggagaataagtcaacgcataccggtggttggcttgggtaagcttttcttggctctcctggagcagggcttccaggctggcaatacgctcatttcttgcaatcagtttccgctcagcgattgccacctccttcttcaaactactgttttgttccacaagttgacgctgcacgtgggttaattgctcgaggttgcgctctaagaacgccatcttcttctgctgagcccggttgttcgacgatcgaaggacgttgttatactgctctcgtgcatcatccagggagatttccaactctacaacacgctcgcagcggttctgcaggtcacgcatgagagacttcttcatggcatcgaactcggtaatctgctgctgcaaggtcttgcttgcggcaccattggtggaggtccgggactggctgtcgacaagcgattgtcgcaacttggtcaactcttcatccttgcgtaaaatgtcagaacgaagatccgcggccgccgcagtctcagcctcattctttgccacgtaaacgtgctctagccttcctcggatctcttccacatcgccctcgcccaagttgcgcgtcaagagatcttcatactctcgttgaaggccatctagcctcttttccaagtctgcacggcggctgtcctgcagctcaccaaagtcacttcggtcgttcacggtcagctcggcttgtcggataaagccttgcgtctcgacaagattcgtgcgaaggtcaagaatatcgtctggtgcaatgagttcacctgcagagctgatttggtgtagagcatcgacgcgctggatgaggtcttgcagcttgcgttcgttatcggagaacacgtcgccaccgaggtcaaacccagccatcatcttagccattttctcagtcttcttcttttctttctcatcaagtgctgcagtagtctcctttgccctcattcggacatccagaagctgctgcttaacttcatccaactcgcctgtgagttccgagttggcctcccgaaggctatccatggtgatagcggcttccttgctctcataggagaccttctcgagctgcatacggagctcgttgacttctgtgcccaagcgctcattatccttgccggttcgcgcgccattctccttcatggacctaagctcgtcgcgtgcctcacggaggctgcgctccacgttgacaatatgtgactccttctctgaaagctggtcttggaattcattctcacgacgcaagaattcttcgcgctcgtccttctccagcaccaagctgggggtgctggaccgatctccaacccgtgaatctgggcgcggggtttctgaacgcgcagtctcctgcagacgtgaaggcgtactcggccgtgggccgcgggcttcagccttcgtgtaactgacaacttcgtttcctcgagagggggtccattggtccttgggaacgctgtcaccgctacgccacaggctgacttcgccctcaagcgctgagatgtagctttcgaaattcgtcatttggctttgcgccttgcgcagcagttgcttcatctccgaggagctcagctctgcattgaccttagccttgttcttgatggccttggcgcgcacaccaaaacgcaaggttgagattgtttccgcatcgttgtagctgctaggcgaacagttgataatcaaagtcgttcgagagttaccaccgagggattcttggagaattcgagtgagtttggagtcacggtaaggaatgtgtgtcgatttgccgtcggtcaatgcgttgattaccattcctagcgcacttaaactcttgttgatcttcttggcctcctccagagtctggccacttgcgccggtctttccgaccttttcgctaccagccaaatcaaccaaaaacaattggccactcttagcagacccagtctcgacattcttctgggtgactgtgatcacgaagatggagtgggagcgggacgattcctggttcatattggttgcagcgacggcgcgtgctgctcctccccggcgcataacttcgtagacctcctgcacgctagatacgtagacttccagcaatcctttaacgtaaactccacgagctttctcctcgtgaactggcaagttgtcgttctggggcacgagtaaatcacggatccgctccatgtaaatttccatatagctgacccgcacggtgtactcgatgttgctcgggctggtcaggatgctggcgaagatttgctcgatcatgcgtggaataatacccttccctatgtcatcatcgatgtcggaacccatcatcgtatatgattttccagcaccagtctgaccataagcgaaaactgttccattatatccattcaaaatatcgtccaccgtcggtcggatagagaagtcaaagatatcgctttgcgcggtgtccatagggaacacccgatcaaacgtgaaggcccctgtgttctctcgggactagaattccgtcagtatagcctcgtgagttatggcttcagttcggactcacattgatgctacatgactcttcattttcgaattcgacaatgggcttacccccagaggacaattcgaccttgttttgcggacggaacctagcaaccactatatatggccaatcagtccaagtcctagtagaacgcactttattttattatgccagtctgtgcatacccttgatggtgttcgaccccgcggacctgtggaaccatattagtgatggccaacgcacgatagggccgagcgtactcacgccatatttgtagagtgacttggctatgacacgcgcaagctagaagatagagcccaaaaaggggtaggtgggccgcgaagttcgtcagaggcgtttcaaatggaaactcgtctgttgcggtgtagtggctcggaggaggggtttaagggtcagggggtccacgtgcaacgtggaccaaaacgagcaaggaacgaagagaaagataaagcagcagtcaggccgcaaagaaagtacggccaaaccaagaagacctacaatgggactttgcaggggagggggttgacgcgaaagagtgggatttcaactgttgactgtgaccccgtttgggcttaccgcccccggactcggatatgcaaccatcctgcagataagcttaatgtatagggaactatacaatgaagcatatgattgcacgtcttgtttacttgcacgcccatttatattccttacaacgaacacgtcacaggatcaaagcgcaaggtttgcaggaaatgcaggctaatgcactaaaactatgcgactaatcttgtaaactcggatgacatgacttggtgaaggaggaaaaagcatgagctagagatatcaaaaaagagagagaacatgaaatgaaaagaaaagaacgtcaaaaaaaagtggggagagaaaagaatacacaaactgaaagaataagataccaagcgccataaaccccatgctgtgcagatcaaaaggtcaagctgctgtgcccattcgtacgaatatcagcgcatcgaactcggctgagcaaatgagactgctcagtctcagttgtcctcccagcttttctcgaccgtctcacgcactcgcttggtgtactctttacggttgtctttgtagaggttcgaggcctcgacgttggccggagacgaggtgttggggtcattcagaagactagaattgacgagccgcacattagaatttgtatagtgatctttcatagacaagccagcgatacctttgaatactagtaagaatagccgccacatcatatgtcggactccagcggttctgcagaatatcgagacagagctcgccggtcccgtacacattaggatggaacatttggcttatgaatttcacacccgggggtttgttggggtattgttcttcaaaattcatgaccaggcggaatgtgccatcttcgaacggtgtatcggcggggccgatgatgacggcattcctagcatttcatcagaatcattgtcaagagcctcaaatcatgccgcggaagacacataccatgtcatgacattatcagcgactggagatgcagagacaccagctgggggatcggtttgcatgcgctgtgagtatggaaatgttagcggggcaaatcatcttggacacagaacaccggggaagaatttaagaagcaaatcgggctcatagggatagctttatatgagattatttatgggtacagtagaaacgtctcgaatagcctaaggcgaggtgacaatattgacgcgtaccttgaagtcccgcatcagacgacgacgggcggatgtagacatgatcgaatcggggggaggcggaaagtaaatgaaatggtttgctaaagctgtgtgtatgtagctagatatcaggatttgcaaatacagtcagaagtgaagggaaagaaaggagaggggaaggagaggaaacccgacaggtcattgatacggtaaggcgatatgcagcgaaccgatagaggggaagtccggatgaactagcccaatggagaaaccaccccaatcaggctagagtgaatttccgagcagtttcccggggccccgggaaactccacggctactccagtgctgactcagcaagaattatgtgacctcgggataatttccttaacaaaaacttttaactagcgctttcccaaggttccaaggttcacctaacccgaccgcctcggaagaagcctcggttcaagcggagtggcggttgtaggcggttataagggcggataattttcaatacatatgcagatgcaacagcattcctcagttcttcgtccttaatcatcccttctcacaatctgatttctcaatactgtgacctcacccactcaccccctcatcttaaaacaaagtcatgatttccgcaggcatgtctgctcgtctccccaaacgggtcttccccgcattttgcccccagcgacagttcagctctgcacgcccgacatgcaaggagattcaggaagcttacattctgagtgcatctcgaacaccaacgacaaaggtgggtacctttagagaaatctcctctagaagaacaattcgctaactcccaaggtagttcaatggttcttttgcatccgtatcagcacctgagcttggcgctgttgcaataaaatccgccctagccaagtccaaggtacctattgagaagatcacggatgtgtatatgggaaatgttttgcagggctcagtaggccaggcacctgcccgtcaggcgtctatatttgccggtctcccttccactgttgaagccacaacaatcaacaaggtctgcgcttctggcttgaaggctgtgtcacttgccgcacaaaatattcaacttggcttggcagaggcacaagtggctggtggtatggagaacatgagtcgcgtcccctattatatggcacgtgccagccaattgccaccctttggtgagatcaagctagaggatggtctcatcaaggatggtttatgggatgtttacaacaatttccacatgggtatctgcgcagaacatactgcgaagaaccacagcgtctcgcgggaggagcaggatttatatgccatccagtcatacgagcgcgctcagcaggcatggaaggagaacaagttcgccgacgagattgccgcggttactgtgaagggcaagaaaggagataccattgtcgaccgggatgagggcttcgaaaacttgcgtatcgacaagttgaagggcctgaaacccgcctttctacgagatgggagtggtactgtaaccgctggcaacgcatctagcatgaatgacggagcatccgctctgatcttgggcaacagggatattgctcgcaagtatggcggtggcagccgtgtcttggcccgtattgtttcttcggccgatgctgccgttgaccctgtagacttcccagtggccccttccaaagcagttcccctggcgctggagcgtgctggaatcaccaaggaccaagtggcggtatgggaattcaacgaggcttttgcggctgtcatcaaagccaatgaaaaggtcagtgccgtatttgtctaacttccataccagatctaatttctagctcctatagattctcggtttgcagaacgccaaagtcaacatgcttggaggcgccatctctctcggccaccctcttggcagctcaggctcacgtatcctcgtcaccttgctccaccaattgcagcccggcgagtatggagtggctgcgatctgcaacggcggcggtgctgcaactgcgatggttgtgcagagattggatcgggtggattgatttcaccaacaatgcaatgtcttcggtggcaagttatgactgatgccctcaaacgaacaatgcagacttggatatcatcccgtgtagcagagacgtgcacttttcttggatttggaatagcggattggccgaaaattgtatttactcaccttttatgtataaactcatcgcctgtttctttgcggacctttttatatggatacattagtactatgtatcattctcgagctattttttcttcatccctttccttagatctcttatatatatccataaagccattaatctatctttcgctcccgttttgcaactttgaagtgatctttggaggattcttagggtcttttgtggttggtgcctgattcctcaggaatcaacccagcagaatgcaacccaaacaaaagcagactctggcttttcttcttcatatcctcatgctctacctcgcgaacactttatataccaataatgctgacacggcaaggatccgacatctgacactatgctgaaccctgtggccctgtcattatctccgtcttgccatgacgccatttcttggtccccggacggtgagcttgctatcgctgcgggtgaatactttcaaatcctggtatttatctagttatccgatgagcttcaatataattgacattttcatagacaccaaaaactagcagagatgaggactctgcccccaactcaacccaagattggctcataactcgtgttagagccaacttgtttacgaactctgaatggccgaactaccttccgggaaatcgagatgatttctcggtcgctgcagacctttcagaaagcaatgtggtcggtctcgcttggtccccagcaggactaggcaaatatcgacgtagtgtcctagccgtgctgacgtctaatctggtattgtccctctgggagcccattggccttaagaagcaatggaccagggttgccatcaccaatcatgtattttggtcacagctgcagccatcacaggacccaagtagccatgcctttcggaaggttaacattcgatctttcacttggtgcgagtctttgaagccatcaacgcctaccgcgggcgcttcctttttacattcgcacgaaagccgctggggaattccactgctaatggttgtgaacgatttcaatgaagtcatgctagtgcaggttcgcagatcagacccaacgaatagcccttccaagccctatgatcttcagattctggcgtttcactctctaaagaacccggaaaccaaggacagtccgttctgctctggatcgctcttcgagaaggcaatgaaagagagacaacgtactactgtgctttcctgtggtccgtggcagatttcacccgcgacgagcctggggaactttggctgcgcagtcaccatgatagctgcggtatgcggaacgcagcttcggctaatgaaactcaaagtgactctcgggagcgagctcggggagacttcacaacagtacacgttaagcgccgatttgacagagcatcccctggatcaattgaatgagaaatgggcatatcacaacatcgctggccctcttagatggctccataccgtacgttcgatttcttacatccatgctaaaatgcgccatttctctaataaaagcctaacagagatcatccacaaccattgtcctggcagtgggcgccatggcagcattcatcgccatatctatgccctacgatacgtacacaggtagcattagcaattctgatgccttcgtatttcatgactatccaatctacgagccacaaaccgaggacaacaagggccatcaagcaaggcacctggagccaatttcgggtatgttatttaaagacctatgaggccctttcagcacttctgaccagctatagcaatgctcacttccgtgaatgaacaaagcgacacatgcaagctctacttaggtacactcggtggaattggcttagtcacagaacttcgccaactacaaagcaacagcgctctgcaacaaccaaaatggaaacgcatgattgaagagtttcaggatgactatgacttagagcacgacttgggaggaatgtcagtttccaggatttggggactcgcagcctatcgcaacatgactgcggctatcttcacttcacatcccacggacatgatcgagtatcgcatcacctctgacgacaggtctatggttgtcttttcagaagagagtggacccacgatcaatacccaagccctatttgcggcgcaaatccccgatgatcataaccagacaggagaagtgatacgtttcgtgctacctggtgaggacggcaatattgaacccgacatggagagtcaacgcctgctttatgccgtagcttgtcgttccattgtgggtgaagaggacaagtcgcttcggcttcatactcggcggtctctagagcgtctagcagtagtaacaggcgcggacctgagcgatgagatttccaaatgcaacagcaaccccgtcccggtatctgcgaagactatggatcaggtcactggcccaggcggccacatttatgagaagtgcgaagtttgtaatgcgggaattgggtggccctcagcccagttggctcagtgcgccaatggccatctttggggtaagtcacctcatggtttgaatttgatagtaacgtgctgacagttttcattcatatagaacgatgtggattgtccttccttgccattcaaggacctgggatatccaagtattgttttgtctgtcgcaaagaagctctcgatgaagaactcgtggcatgcatgtgtggaggaaagcaaggtcgaacattcgatgctctctttgagacgtttgatatctgcttacactgcgcagccaaattccaggccagttactaggtgtcctcagatagaatctgcaataataacagtgtctccttgatggctagcggctgcaaaaaaagacaagatatgtgatgtgatattgccacacaatgcttccaacggataatcatattcatatcatttacagagagctatctatgtgagcccaaaaagggaccccgcaataggatcccattcgtcgtcccatcggcgagagctttctttttgggcacctagacgaagactttccaatttgtcgttctcaccgaacaggtcgaccaagtgctcagctagctcctctgagcttccaaagcctaacccattcacgccctcagtgaccagctcgggccatgcttcgaaacgatcccacccaacaacaggaagaccagccccgaacatatctacaaccttcatgggcagatctaccccactgctgctggtatgcagactaactcctagagatgcggatgccaatagccgagcatattctggtacactcagccacgcagttcgaattgtgactttctgtaacttgctggacttttcaagggccgcaatctgttccaaatacatctccttttgtgggccctttcctgttatgatagccaaaatctcggggaggtgaggctgcactgtgatggccagttccgaataccggaggagggcatcgatgaggaccgagaaatcttcatccgcagtccatgacgttgaactgactagaacacggagagaccctactttcaaatatgagtgaaattctttcgtttccggtagagtcgtgaggaaatccattcgtgcattgggatcgaggataggattgaagtgactggcagggcggtcgtgcagtggcaggacaggagctggaaggttgaaatccttcttgagaacggatgccatggcattggtgacgcaaaagtgggccgaagcagacttgcaaaataccttctcataccatatcgacattttcaccaatggatgggttgggccgagttttaacgcaagtatggaatatccaaaattatgccaatcaatgacgagccttgtttgccgcaggaaacacacaagggaggctatagccagtgtaggaatggaaggcgggttcttttattcaagagggagtcagtacttcaaatgaagactgaggaacctccctttcagacatacctgaaccaaaagccattgggacggttttgtggtgtatgcgagacacttccagagacaggcgatctggaatagtaccttcaagggcccgtaaattataaacagcagcttgttactggtctgtaggagagcgggatgcgggcgaagcggaacaatcgaaatgttggggttagatatgatatcaggatgaggatcagattctgtttcataaacggtggttagcgatcctatcttacgttctgtatcaaggggtttgtactaaccattatacccaataattaccacctccccgccatgcttcgcaatgctcaatgcatgatactgcatgcgcgggcttcggccaatgtcaccaagaacaagtatttgaacacatgtcttgcgcctttttgcgtcatcggatcttggagaccctgcttgttctggttgatattgcgaaggaagtaacagaatcaacacagtgagggcgctagacaggccgaacactatgctgatgaaggtctcgatcatgatggcaatggcacttcaagtatttcgctcatagtattgatcagccctcaatgacatcaatgatccttagagagccaaccagcagagggaatatccacagttcgatgcttaggaagtgctcgcggctccggtgtcccgaggtcaatcatccattccgatacgtaatctgataaggattcacgtgattccccttatgagaacctttggggagacgggcctttccttagagatagtggcaatttgtttgggcctgtacgtggcgctcactttccccaattatattactttccttttattaccctccggtcctattccgcaatgctggatctgctgacaacctgcccgctaatctgagctctcgcccgctccaccctcgatatcttggcagtgccccatctcctatccttttcgttggaccttccagctgctgcgcaccgtcagcatctgaagatcatgtcgacgggggcaccgtctctgggcgtggatttcacaccacccaatggacacagtcataatcatagtcatggtcgcagtcgtggccatcgatccaaccgctgggcgcaacctccgccttccctctcacagccagctgatgccacctttcctgaacaaccggagtcaatcaatgctatgaattcgacttattcatatggggatacacatcaaatatcagcccacagtcaccatgcgcattcgcattcgcactcgcactccagtggacaccacaatcataaccatagtgtgtcatctcttcaccacgatgtgctagatgaccaccatttgaaagatcccaatggcggttatggaatattatctacggataccactatacaggcagactatagtccagggaatatgtacgtggggttagaatgttattgacgagtaaaagctgaccctaattgcagcaacgagattctgactagtgcactcatcgtgctgccgtgggttacgctttcttggtaccagagacaaaatgcccaaagccaaaatctatctagcgaaggtatacctggtacaactgcgagcattactaccgggcaagttagtcagaagacctgccttttgacagcgctcaccctcaccctcttcggctgtggtcaaatactacgtatcaactaccaaaaggctggctcgtccatgctcttgtccgttaatttccccaaactaaatgtgaagaacgtccaaacttcacttttacaaattgtctcagtggcactgccaatatttgcagcgctcaaggtcggaagttttttggttgcatttgcgctgcttcttgcgacggcatcgagggtcccagcaatcatcaatagagcttcgcacactcaagagaaatacggtcgaaagatcctatccattaccctgttagtggtggttattatatcgagtttccttgggctgaaccatccttgggacgtatctccagtcattggatatgccgccctattaggatctgtgtttattgcgcctcccccattcccctctctccgtcatcatagacctattcctgagcctggtcttgttgctgcacagagcaagacttcacgtctgagtcactcctccgctgtggtcacgactgatgcaccactggccgttatatctgggtcctcccttgcactcctgagcatacttctcaaccgaggacttgttttcagcatctgggaactggtatatctccttattccgacgggtatatttgctacttctcttatgattttcctgccctccagcccccgctctcccaaaaaggccggactcgccatttgcgccggagctgcagcttttctttgttccccacatgtccaggatgacttgctcatggtttatgccacacgtggtgtcttggctacggcttctttctttgcctctcgaagggatgacattcatttgcatctggatacgcatgcgcatagccacacgcacattcattcacattcacacacaacatcagaatcctcccgagtatcaaagtggcttcttcataaaagcgaaccatacccgttgctgcacagcattctcaaagagaaggattcccgtagcatcttctacttcatgtggtgagttatgaaatccaataattgtctgtcctgaattactgctaacattttcagcctgaatttcacttttatgcttgttcaattatcatatgggttcctaactggatcattgggactgcttagtgacagtattcacatgtttttcgattgtcttgcgcttgttgttggtttatgtgccgctgtcatgagcaaatggcccccgaacgctcgattcccatacggctatggtaaagttgatactttgtcaggatttgccaacgggattttcctcatgtgagtgttgccaaagcggtgcgtagaggcaaattctaacaacatacaggatcatcagcgttgagatcatttacgaagcggtggaacggctctcatcggggagtgaggtgcatcgtctaggcgagttacttatcgtcagcattgctggccttgcagtcaacttggtcggaatctttagcttcgagcacggtcatgctcacgggcatgatcatggccacgaccattctcatggcaatgagaacatgcacggcatcttcttgcacattcttgccgatacgcttggttcggtggcagtcgtcatttcaaccattctcgtgcattactccggttgggccggctacgacccgttggcatcatgcttcatcgccatattgatcttcgcctccgctgttcctctagttagcagcacggctaagacgctgctactcactatgccagccgacaccgaatatactcttagggaaacactagcgggagttagcactttgagaggcgtggttagttatacagtgcccaaattctggcttgatgatacaggaccggtatcttccgggcatagccattcccatgaccattccgagcatggggactgtgagaatcaccatgatcatagccacagccaacaccatggtcatgagcagcaccacgatcatgaccacgatcatgcccatgaccatgaccatgaccacgatcacgatcacgaacatgcgcatgagaagaagccccagaatattttcggtgtgatccacgtcgtcgcttcccggggtgcagatttagaagacgtacgtcaacggaccgtcgacttccttcgagagaaaaacatggatactcttgtccaggttgagcgtgacggagatgcgcgctgctggtgtaacggtgggagtaagggcttttgattggtgacaatgtttcaaccatcatcaactgttctcaaagggaagccagggtttacggtacatttaatatcgctttgccccggccgatgtctatatatctcttgtacagataggattggatcggttcgccgaaagattacaccgatcaacagcacatagttttctccgcagcatcggaagtgcaaggcatatacttcaatgattcaataacgaaccccagttcttcatcgcatcacatgtaggcgaaacctatcccggaatccttcaagggtgaaacttgtacgacccgtctatcagttatagactgtcctgaatggatatccttgatctgagccctacatttctcagacaaatggagtgcagctccgtcggtgcccctgaggccagatctccgtgaattgcgacacgatgctccttcgggtcacacaattacattgaacctcggcagcacatggcgcgaaagtccagatctacgtattgtgttattctgacaagagcgaacctccgtttcatctcctcgaggttgccagccttgtcaactaaatcggcaccaccggccaacctgccgggccgcggctccagaaaaataacctgtagcatctgaaccgtacaaatggaagagtgacatcgagtcttgtgctaccaaccactcgacttctaggtttggacagaggatgttacgacattctatataccttccgacaccatcgcaaccccagccgatcctttctgtcattcttctacagagcctactacagagatatcaactacactctacatttgactctttcgtccagtatattcaatgtcatcagcttcagcttcgaccgcaaaatcaccgtatgccgacgaagtcgtgcgaggaggatatgcaaaaatatttgagggccatacagtcttcctcaccggaggtactggctgcctagggggttgtctcctctacaagctagctctgcaactgccaactcgcaagattttcgttctggtaagggggaactcccagcgggctattggaaaactgagggaatcgataccaaatcatgcacaggctattttagccacgaacaaagtcgagtttgtgattggagatatgaagacggtgaactttgggattgaagctactatccttcagcaacttcaagatcaagtgaccctggtcattcatacagcagccaagatcaaacttgaaggtcccattcgtgatgcactggagaacaattgtctccctgcgctggaaatggcacggattgcctctagattccggcgactgaaactcctcatccagatctctacgtcatacgtcaatagtcatcgtccggatggcacggttttagagcggatatatcaattgggaggcaaagaagatgcagaggaagaactggcatccatattgacgctgggcacatcacctcacgcgggcaaattctcatctacctacacccaagccaagcatctcatggaacgtctactactcagccgcttccctcttcttccaattctactgctacggccaacaatcttcggtcctgcgctcagatacccttactcgctatatggaccggaggactccacgcctctcaacaagtttactaggctttggttctctgatcgaggcgccacgcaagtttggcatgccacggaaggctataaaacaggcgccaatatcctagacgagattcccgtggacctcgtagcaaacgcatgtctattgcacgcagcagcacggactacgggcattgtccagattggttcccagctctatcatccgattaccttcgatgagatcttccgaatgggcctggaaaatgccacgcctgcagcccagcgagagtttccgaagatcatatttaccgaagatcgcagcacaccgcaatgctttcttgcggaattgattcaagtaggaactcgcaactggttattcgattgcgggcggtcctactggctcaaacaggtgagcgggccattgagcatgcaggtttgcaagcatgaggcagatgctctgaatttgacacggactcacgatgtcctcggggctctaaaggagaaagctcggatctgaactgagctgcagggaaattggaggctgcaaatcggctataagatactttgtagcccccgtaatcttcgagctatatgagacaaatatgaccttcgtatactccacgctacgtctatcataatacttcctcgattgatatttatctaggtcattttagagaaaggcttcctcaattaaaggtagcttcggtttaaataagccgagttcattatccactgtagtgggggattccagtataggataacccagcggccatatgatctaaaagcatccctgaaagatagcaacgcagacaccttccacttctcttcttggtagtcaccccacggtgttctcctctctagcaccctaatattcccactgacgactctgctctcacgcctgtttcgtaggcagggtcccctcttcacaacccagtaaacttgctgtttcggatgactagaaatacgttgattgagtgggccagccaacctgttaaggatcatagtacacagcaatagaacagaagctattaatatttatctatcgggtttcttcacattgggtttcctcgtgtgaattacaaaaagcgggtatagtatatcaaagtcccatttttttccgggcccaagccatagcattagcccattccatatccccgggatgcagtgcatccaataattcggagaccaatgcccggcccgagtctcgagcccaccaatgctggccatcaagctccccgagcaacacaccccagtgcatgagaatcaacagagatagaggctgtcggcgtcgcacattgtccacgaattccttgtcgctcatagcgagccaagccagaacattggcagcatcaacagaattgccaactctggctgagaaatgccgcagatagacaatagcatctttgttgacctgatgctgatcggggtcgatactagcgagggcctcatcgttcaaagaaccgagtcgctccagggcatcccgcatatcgctatctatactggctaccccactattccaatagtttcttcgacgggtaaacagctctaatttaatccaagattcaccaatccggtggatttttctcacgccttgcaagagttcaaatacaacgacaatattctccgttatgcttgaactttccccgcgggcagcagtcactcttggtagagcgatgcctataacggtggtgataatggactgcgccagcgcagcctcgcagttcattgggttgatactgtcaacagctgcgcgatatggcgcaaatgtgagattgtgatattggagggcgatatcaatgtacaccagcgatgccggtggctcgattgtggcggcaatatgaagagcccccagagccagaatgccgttcattaaaaaatcatactgaagagccaggcgaggaatggcaatctgccagacgtaatgctccgagctggaagagcaaagactcttataggtttctgtggaaaacttatgcataagctccagatctcgcaccgctgaaatggttgaagaaacgggagctgtcagcctagggatcctcggccgcaggggagtgtctataatagccaacggggccggggtctggcttgctcgtgaatcgggccgagccggcgctcttaaatatgtgcatgggagttcccgtgagatacaattggagcacggtggccccttttcgtcacactgcattcgttagtctcgtcatttgatggagcccgggacaatctatggggccatcccaagtttccggaactcaccttgacgcgacgtctcttgcactgatcgcagccttggcgagatttagtgtgcgctcggcgaggaggcatctcggaaaccacggtacctgagggtccatgtaaccggttcgctcggatccttcgagacgtggaagagtccaagcgcgggagagaagatgatgatgtggaggagtcacgtggaccgagactataaaaagacttccctgccttgttttctctcttctgtatggtttaatcttttttacagtttctaccttctacttcttcgtccgggtgtcagattatgcttatttgataatacttttcaaaacgccgtggtcgcttcgtcctctatttcagcattagccttacacagtcacatgtcccaatatagccctaggacggacttgaaagtatgaactcaataccgactgacattatctagattctacagattctacagattctagaaagaaatgtccatctcggaccaaaatctctcggaccaaaagcaacaaatccccgaaaggatcaaagcgccttatagaaaacaagtggatccggcgtaagcgacgtggagagaacgagaacgagaacgagaacgaacgagaacgagggcaagaaacagccaatagcgatgcatttggagccggtttcatcgtgttgaaccaatttagggctccacctgctggaggtgttgttgctgcggccccttgatattgagttgacctgcctgaaggctgataaatttatgatttgatatccaacccctccagggattttctccattgagagactcgaggcccttttccttgttatcccaccttctaggacttactctcactcagctctcttttactctccttcctttactctatatttctttccttttgattacacatctcactcaacatggcgggctatgacacttgcttcgaagtaagcccacaatgtcctgttgaactcacgacatacggttactaccccaatctcggcggaaacatcttcttcacggtcgtttttggcctactcggaatatgccaaaccggtctcagcatctactaccgaacatggacattcttgatagctctgctcattggaacatttatggaaatggctgggtacattggcagggttcaaatgcattataatccatggtcggcacctgcattcaaactccagatcgtgtgtctggtgctcgcgccgaccttcgtcgcagcgggtgtctacctaacgctgaagcatatcattctgaccttgggacctgaacactcgatcttgaagccgcgccttttcacctggatcttcatcggatgcgatattggctctcttcttttacaagctgcaggaggtggtgtcgccgcagctgctggtaacgatgacttccaaatgctcaaggcaggcgacaacattatcatcgctggtatcgccttccaggtcgggaccatggttgtatgtggattctttgctactgtcttcttctggagggtcttcaaacacggtgatgggtttgcgggcgagaagaacctcgatgcaccgattatttccaagtggctgccgttcgtcgtgggcgccgaggtctttgcctatgtcacagtcttgattcggtgcatttatcggtaagagccaatatgcgtacaaacaagacactttactgaccccgatatctagtatcccggagatggctggtggctggggaaacccgctgatgcagaaggagaatgagttccttctcttggacggaatgtaagtggtctcttggttcttttgaaagctggggaaatcatagctgacgtgtcattaggatgattactctcgcctgtctggccttcaccgtcttccatcctggaaagttcctcccatcattgcgcttcacgtccaagacccgcacataatagcattcttttatatttcttttgagggtgctctcggcgttttttagatactttctttccagcatgtgcctatgtcagagatgatatactctacttaatcagggtgtaatgaaaacataagaatcagttgtcgctctacatttgtgctagatttacgtcagattcggaaattatttcggaaatagattcgatccaaaccagacaagtacgctaaataaagctccagcctcacgaaatcgcaaagaaatgcaccacaaagtgaccagcgatcgagagcatggcaaattattgctcgctctatgcaataaagaagagaaaagaagagaacaccgctcgccgcggtacattgaagaagaagaaccccggcaactccatgttaaatcagacataacccgccatcttaaattgccgtgtataattaaatcgtgtctagtcgtccaacgtcagacggacgcaccgtcggacacgcttcttaaactccgcagggtcctcacgccatagccgagcagcctccacattcgccgggctctcgtcgtttgggctggaaagcatagagatgacggacaaaaggatcgtctcgggtgtttgcacgggagaccagcgttccgcagccgactcatagccgtatttgtcctcctcgggcgggtggagaatggaaatgcagacgtcgccactctcataaactattaaatcggagtaaattgtgagtaagttgtctgtgataaataattcaaccggaaccacatactattcggatggaagataggagattcgaacttcatctttggcggccggtgagggtattctgttgggaaagagagacgagccctgaaaaaaccacctaggcaagcaaacttgtgagtattcttcaatgcatttgtagcaacatatccctagacggcattatgtttgccacagcaccagtcgaggaattgacgtcaaatccatagagaaatgaggccatcacatacctccatacagcttcacatcgtctgatatcatgagcataacttcccattcgaaaacgttattatcgaccaagccacaactgatgccgggaatatccttatcggactgcatctgctgcagttggcgggacagcatgcgcccggcgggagaagtcgccatgctgatagtcgaggaagataaagcagaagagtggaagggtgaaattgggtcgatatctgaaatcgggttcaatgtcaaaagaaagacaaagagtaggagatgaggagacggtgaggggcgcaaaaagaaatgtaggcggtaaggctaaagcggggtttgatagcctagatggggaggcggtagacaccatgggcacgtaattagttgctactttgtatgtctaggtagccctggaggtatagactcgatgaggaccttagggttgtcgttatgtttaaatctcgtagtgcatgaggaaggtgaaagactattgtatgaggcaaacatttcaatctctcccaatgatatagatgtagcaaacgcaacaattacacacacatcccagcatttcatcatgtaccaaacatcggatctcaatggctttttactttcagctcatttagagtccaggggcacccatatcgatcggtttggcagtcttggaaatccaaaagatctgaccaccaagtaccagaagagcgaaaaaaccaagtgccacctccatggcaaatgtcttgccaataaccttggcgaagcggatacgggcagcccagtcaaaggtagtccatgcatccatgaggccgatcttgccgctgccaccggtgatggccggacggactttgcccccgaaagagcgatcaaatggcacaatagtctcatcctcctcgggaagcatggaggcagccacacggacaaagatgacacgagcgggcatagatatcaagaatgccaaaagagcaggaaccacactgacgcccatgaagcggtagatggccacaataggcgggacttcctgataaccggaaacatcgagccagccagcaagattggcaatggccatggggatgaagaaagcagcagcggtgaggacatcctggagagcagcggctggggcaatcttgatccaggtcttgtagctggggatacgctggtagaagcgctttggagagggctcagagataacaatgtgcacccaggccatctgccaagtagccagtaccacgctcaggacggattgaacgacaaactggcccaaatatgaattggtaggcacagggacaaaacctgacaggaacccacgggccatagtgtaggccacaaacatgctcattccacggaagcgagaccagaagccagcgcgggagcggaggtgcttcacagtggtgcgcagcttgctggtgataggcttgaggggagtaggagcgagcagctccggatcattctcgtcggttggcttggtgggatcgggactgggaataatgcgtacgtagatatcggggttggtatcttccactacagccagagtggagaccaccattccataggtatactcgatctgtcgagtgttagttccacaaggtgatatctggaaagatttttttacttacagaccagaaaacaagcccaatcaaaatagcagtgatagcaaacagagccaccaagcctccattcggctcctgcttctcaggcttagactgcatgtgagtgacagcaagctcggtgccccgacgcatcaggacgttagtgacggacatgatgaagccgacactggtgaatatatatataatatattcgatggaaaagagatggaaacacgaggttggaagtgcaaagatgagaggggaagacgggggcttttatctgatacaaagccaggcagcagaccactagcgccggagtcgtcggtacccttagagtacttagagttctgacggactccacctataattttaggtacctggcgtgtaccctgatcagcctcacgaggaactcggacactttcttggacatttccatttccctcgaacaacttttgttctctctatgggatggccatgtatctactattttgtactacttcttactgccttggactatttgcttcaaaattcacccaatcatccgatgatataaatagaaacccctgggatcatcggcgtccaattcctccgtgccgaccaaacattgccaggttgcctccgatcaccattggcccccgacatgttagcgctaaatccagggtgcctaggcgaagccggctcggccaattctccccatcgagagtgaaaaaaataaatgaaaataccgcttgagcctcaattgtctcaggcaaagtgtatatggctagaatttgccagcttgtatacattctagatccaatgtggcatgcccaactcccagaaatcaccagaaagtgactttctataaatatcggatatcaaccaaagatctaaaacgaaccccaacatgaccagaaagatgcgaaccaatcaaagccaactcatggtcgcagacaaccatccgtggatgggagacaaaacgctgaaaaaagagatcaatcatggtatgtacacaacaagaattctccaactttagtcaaataacttcttcatgcccttgtgtgccagctcaacgccgaggaaagtggcggcattggcaggcaccgcacgggcgagagcaggtccgaatccagggaagaaggccttcaaaccgccgctagcgtaaaccgagcggataacaccacccatggtaggcttgcccggtgcgctctgcaggcgggacttgatggtgtcaacggggaagacagggatccacatagcgataccggcggcaccaccagcgcacacaacggcagatagggagagctcgcccgtcacgttgccttcggcatccttgggggtcaaggagcgcttgatgtactcgtaggccgcgaagtaggcggccgagccgggaccatcacgggccaacgtcatggcgctaccacggaacacgctgcgaacaccaccttccttgtacagctggcgcacgacatccagaccaccggagtactgaggtttctcgcccggagccagttgcttctggccctggatctggaggaggaccttgacacgctcgaagggtgccgtgatcagggtcatggggatggcggagaagaagcctgcagaagagatttgtgcgatggagtactgcggggtgtcgttcttgactgggacggtagagaacttgctcacgagagtcttgcccacgtcgtaaccctaatttgttgttagtatcgcttccggacgggcgctcgcagctgcgggcgcagagaaaaagaaaaaaagacgaacccaaaagctgacggcaactgtgagacaggactgattagctcataactcgatcaatttcagatgtgagagccattatggcgcatgctagagtacttacacatgggagtaactccaacaagcggcgcagagacaccggcatacaatccctaggaaccattgtcagttcggtcgcaaagtattcaatgtgcttgtggtgatcatactcgagccaatccttcacgggctaccgtcttccggaccacatccatggcacctgagtaaactcccttttcggccgtctgcaggcgcaccttgactagatcaaacgggtgtccaacgacgacagcgcagagaccaccaacggcaccggctgcgagagagcgcagctgtacaattgtctggttgaccgccttggtctcgatgtcgttgatctcattctcaagctgctgcgcggtgggggaggtagaggaagacattgtgggcgagtcggagcggggagagacagggatggagatagggatggaggatgaggggagaagagggtgaagacagcaggggccaagagtaagatgggaaagtaattgatagcgcaataagaaaaaattgaccggggatcttcaaatgatggagacggagacacaaccgaagccgactggccttccccggacgaaggtgtgcctcggttcggcagcggaaaaaccgactccccgtggtagatactagcaagtaagaaggaagtctacagtactgttgaactaaatattatggagacatttggcatgttttgctgggtttcctataagaattgaattagaatatactcctacggcgtcagtggccccgagtgcgccagtccgggtgaacgggagagctcaaccactccacgttttccccgcggaataaaggatggctgtgtcaggattaggtttgctccatctctagcttttctcaaagggtataggtgcaggggagatgtgaagtgcctgtatcgttgcaaatgtgtacatgtacggagtaagtacttggaagtccgagttctactccgtagggtcgcaatcacatggaaatccacgtgctttatcaggacgagaattagtatttatacatccatacatccatacgtctatgcattcagatgcataaggaaaaaaaaggattcaaactgaaacacctcatattcagctactcctttaccccggaacttgctgtagaatgcaaggctgcggtttgcgccagtggcgaatccttctatctcagtcttggtacccacttggcgttccaaagaagagggtttgatttcttcaacccttccgtacggagtacttaattagtgtcaactcgcaagaagtacagagtataaatgcataatacagttttcattcattaagctcgattgacattatattaacagctccgtagagcaaagagagacaaacatgatggtacccatcaagaacccgttccatattgtacctatacaagcccgacgacggcaacacatgaatcataacccataaagtaacatggagtacatgcggactctacgcattcacatgtgggacgtttacagagcgaggatagcgaccaggccgaggacgcccatagcaccactgccgacagtggccatgggggcagcggcaccggagctggatgtaggagcagcagagccggaatccgagccagaggtagactcagagctgccggaatcggagtcggaggtagactcagagctgtcggagccgccagtggaggtggaagaggtgctggtgctaaccttggtcaccatggagccggaggcgtcggtgctctagagatatggtcagtgtggttttcaagaagaagatcaagtgtatcttacagtgatggtggaaacggagccagtgttggaggcagaggcctcagtgccagtcaatgtagcggtggtcttggagccagaggcatcagtgctagtcacggtagcggtggtcgcggagccagagacgtcagtgccaatcacggtgctggtaatcgcagaaccagaggcatcagtgctggtcacgacagcgacgccagtggttgtggagccagaggcatcagtgccggtcacagtagcaccggagccagaggtttcagtgccaatcacagtctcggtggtcgcggaacctgaggcatcagtgccggtcacgacagcgacgccggtggtcgtagagccagaggcatcagtgccggtcacggtagcatcggagccagaggttccagtgccaatcacggtctcggtggtcatggagccagaggcatcagtgcgggtcacgacagcgacgccagtggttgtggagccagaggcatcagtgccggtcacggtagcaccagagccagtagaagtggagtcaccaccagcaccggaggtagatccagaggtagagctggagtcagagccggaggtagagctagagtcagagctggagctggaggtggagtcagatcccgcgacaccgcctgcgatataatgttagtttaccatatcaagtgttcgaactactaatagtcacgtaccagggcacttagcgacggccatagcgagaaccgtctcggcgtcgtcgttggggcaggcctccttggtgcagtcacggataccgtacttgtagttatcgctcttgcacaggcaagcgaggtcaccggacttgcaacccaactcggaggccaggttgctcatgttgttgagacacatagtctagagtcgataaggattagcattgagtatgattcaacacgggattaatcgaacttacagcacactccgaggcagcagactcggcggcgaccatgccaaaagcggccatcaaggccagagcaacgggggagaaggacttcatgattaagaattaggggaggaattgaggattctcgaggtcaatgtgtaagggacgaggaattggcaaaagtggaaattgaaagaaatctgcagatggggaccttttataaagacaggcctgagaaacaaaaacaaagtctgcatcaacctcaccagccacctgccccagactataaattgagtctccatatttgacaaaagaggaataaagtggacggagcaaacggtaaagcccaatcaccatagcggtgtggattgcctggcaaggccaagttgggattgttctgcgacccaacgtggcgatgagagaatgaatcgattgcttaagcgatatgaagtcatcacaacatccgaatcctggatttgccctctgtagtggcctgaaatggggtgatcgccccggggatagctcacacctcttctccatcgtcgatctcataggtccatctaatttgccaggggccccgttcggaattgaattttggcttttggcttttccacgatgttctccattattggagccagccctcccattttgccgataggggaatccgtttggctggcatcattaggggtaaccaagattttgatggtggttgagcttccaagctttctttcctctctgtgttcaccgatttgagcaatgtttatggtcaagataggcgaagatcgacgggtcccaatcggagctgaggccggcactaaactggattgtcgaatagtcagagacaccccgatcgcactattgaaaatttgaaaactcagttgttgggacaccgctattttgtggctgaaccttgggacacagccacactatcaatatcaccatgccatggactcgacgctattccggactctaggctctacggacttattacggactactattatgtattccccgatcctgaattgtagacggaggtcggactataaactacccccgttctgtatacacagggttgattcccaagcttgtttcagctttcaagggatacccctggaaagaaactggcagctttgagatacgtaagaattgaattgaaatcatttgactcgcatcgtctccttcctttttttcttcaaactagtaaaatattccgcagatcggaatcaaacatccaccttggatgcgagatactacggactccacatgaagataatgcatggagatttacggagtatgtgctccgtacagaccttatatagagtacggaataataaattaaattgattaagctaggtacatagcactatccgtacaataataatatcaattgccactttactttgacacatccctaacccccaaggtttataccaggtttgacggcgtccggtgttatgaccatgtgctaatcttctatttcctgattgcactgttgacatttgaatatagtctagggctacgcgccaagcaagctgatatctagcaagtgcggctgtgcggagaactccgtacagcatgttcccgctattgtatgagcccacatcgactgaagctcccattcgtgcagacgtcaacatcgtgggaacctgcatagattcaccttggcaaatttgagacaccgctatctctgactttgtatgccccaaggctgctatcgctaactctcacaatgctgaggttcagtatctctactctactccgtactccgtactctagctatagttaggattgactggtaaagtccaacattgttagtaatattgacgttacatcgagtccaacgctacggagtactgcctggcttatctggacttccccgcttcgaaatcctccaacttctaaccttctaaacctccgcgacctagagagttccagttatcttaaaactcggctcggttcattaaaatggttctcagaagttcaaattcgccattgacctccgagttcgatgccttggtacagcagcagatggacaaatggaaagtccccggactctccatggctgtcgttcatggctccagcacctggtcaaaagtatgaagacatagtgcactttattattgcagaccactaaaccacttttaggcgtatggattcgccgagtttcctgatcgcaagatgaccaccgattctctcttctctacttgtagcaccactaaggcattcaccgcagcggccatgtctctcgccatcgacgatagaaaggataccaaattcccccttcgctgggataccccaatttcgtccatactgagagatgattttgtgctggagaacgactacaacacaatgcatactaccatagaagatgccttatcgcaccgctcagggctttcgactcacgacgcctgtttaaatttagtgcatccccagagatccctgcgcgaagctgttcgcaacttgcgacatcttcctatagcctatgcgccccgcactaccttttcctacaacaataacatgtatatggtggtatcccatgcattggaacaaattgaaggccgaactctcggcgagactctcaagaaacgtatttgggatccattaggaatgaacgacacatacttctccgtcacagatgtctcgaaggacccatctcttcgtcctcgactcgtacgaggctacacctgggacccagacaccaacacctacatcgcagaaccatacatgaacgacgtcgctgtgactggagccggcgccatggtgagcagcgtactcgaatacaccaagtggctgcgcgcgatgatttaccaagagggtcccatctcctcacagggccacgcagaactcctgaagccacgtacggtgatcacaaattgggatgagatcgtcgcacctcctgcggtcccatgccatctctatgccttgggatggtttgtgagtagttaccgcggtgagccgttctactggcacagcgggagctggcccggattcggcatcatggtgggcttcctaccgagcaagggctttggctttgctatgatgggtaatacgacgaatgcccgaaatgcgcaggtggagatctacatgcaccttctagatcagatttccggaggatcgcggatcccacacccagtggcagtgggccaggcgacagaactgggaaataggacgctcaaagccaagtccgagtgtgtggacgaagccatcaaacggctttacccgtctctgcctgatcctgtcattccccattctttacagttgaaccaatatacggggacatacgagcatcctgcgtgcagttctatcactctatccgtgcgaaatgggtgtttggttgcagatctacttgaccgtgctattccttcccttatcactctcgtccatgcaagcggggagttctttgtggcgcatcactaccagcctaggacaattggatctctctccggttactacgctacggaattcatagtgggttctaatggaattgctatggcgatgggcctggatgtggagccagctttgaatggagagaagatgtggtttgatcgcgagtactgattctcagttatataaatcggcattgtatatatatttgatatccgtcgccatccgcttgaattgataattgaaaaactcaccccctctgtcaaattagacctacatacatacagatgtagttgctactccgtatgtaaatcgaagcttattaccaaacccatgacactgactggatgccaggatacgaaaaatacagatgcctagcggcccgaaatggccattcggcgatgccgaaccggctcgggctcggtcaagtggagtctcaaaaatttcatctggcagaccagacgagcaaaaagttactgaccgacgcagggatcgaacctgcaatctcttgattcgtagtcaagcgccttgccattgggccagccggccatatgataatttggctaaaatgtgcgctatagggtgcggctcggtcaaggatgatttgaaatttgaaattaggtaccttttgtatggtatactcatacaaagggtactttattataaagttcaagggttgttaagtatatcaaacaaaaggtacctaattttgtaatttatcgttcagtgaagatggcgccaacacacggtatgtgttggggcgcttggcacgatcatcggagagattggatatatactcatttccaggcgtgtgtaatagagtcatatatacacatcagtaacgggatatacataaggaccaagaacagtagggtatgtaaatgcaagaaaacgccgtgaagaagccaaaataagatgccggttagaccgagtcattcgactctgactcggcagtgtccgccacgtaaacatgcagcaacatggaggccttttccgaaaccgtgccttcttcttctgagacaatccgggatcggtagcctagtaccctctgccatccaaggcacacccccaatgaggccagcagctgtccgatgaagaacccaaccaaacaagccaccaacccggcgacgacacctagcaaagcaggaacgacgatgggacggatgatgcgcataaaggagttcttgtgatggcggtagtgaggatgacggtgttcagcgtggcggtggaggttagcgggagtggcccagaacgaaaagaaatgagtctccggtgccgagcgggtttcattctcattgctgctaacctggatagcatcgggttgagcgggagattccatcgggggtgccgccgtggtttccgcggtcttgggcttatcgaagacggagccgaattgtgtcctccagtaattgatcacccagggctggctcttctcgtatagatgaccatcttgatcgctgccacgggctggttcgacacggatgcgggtcatctcgtacttgtcactttggtaagcaaggaggtcgacggctacagcgtcaggtgacaccaggttgttctgcagatcgaaccactcgactcgcacacggatcatgtccgcgatggatgccatgtcgttgttctggagtggctcgacgtcgagcgtgtaggacaattccacggtattgtcactagggtcgatttggtctgcgctgccatagaggggcgcattgagctgcattatcactgatgggggatagagttggtggtcattggcatataggcttccattctgaatgctcaaatttatagactgtatcatattaggattgaattaattgggtcaaaacagaaatatttatcacgcacgagtcttgatctgacgcaattttcgaggtcgtcggtggagggagcgaaagggagtcggagttgatgagaactggggacggcagaggcgagggcactgcccagagagagcattacccaaagcagctgcataatgagcagtgtaggatattgaagtaaataaagtcaatgacgtgcgatagagggaggggagaagaagagaaagaaagaaaaagagagacagcaaggcttataatgtacggagtaaacccttcgtactaaggttcggtccaatacaccttataaagaggaaaagcttagcgttggtctcagactattcttagtgtgtgtgtctcaactcgggaaatgccaatgtctcatccttcgcaagtgtaaccctagcacgctcacattaatatgtattacaacatcgatttgaacagctcgttcaattctctgctgcctaggaactatcgtgtactccaatggtatccacccaggccaatcccaccgaaccgacaccttgcccggatttaatttatcgtacggggtccgcggagagcgaactctgttcgacagatcgacggattcaagacagaatagttagttgcgggatcccaatgtagtaagtgatcgagtgatcgagtgctcaagaaatggccgacacagtcagcgtgtctgatgtcagattgaagaggcattcaccattggaccctgtgaatccaccttgttggcctgggagaaaaatgacattgaagaccatgaatcttggcgaactaagaaactgcaattaatacgagtacaaggagataccgacttgtatgatttctgtgtgttcgttggttcgtttgtcctgacttaccaatggatatcccacgtgggtggaggaatctcagattaattatctcgaattacctccaactctcgcaattctacacttccatttccaccaattgaaccggcttatttacacatcctatgtacagcatccatcgtgtctatattgcatcacacactcaggtcgcctggtaataaggcgcagtctgccagaaccggcagcgtgggttgttggtcaggtcccgcgtcgcctggatgctattattgccaatgttcatgagctgtgcatactggccatgctttcggaacaccggtgccagatgagacttgggcacgccatgctggacaaagctggtgaaataatcctgcatagccaacgccacggtcgcgttggtgactcccaggagcgaagagctggtcttattgtcgtagaacgtgtatgagacatcctgtccgtgcagcgcgggcgggatgctgaactcatacgcataggtctgattgtagaacgcgcggttgatataatcggtattgcactggaagatgaggtcggagatgacgagcgccgtgcgcgcgaccgagtcggtgtacccataagacccgttatagaccggtgggtagaggacattatagacaaagtcggacacgtttttgggagtgttcggtgacaaggtcttcatttgagtggccagaccggtgctcttgacgctgtccggcgaagtaaaggccaacccctcgtctgcgttatggccgaccatgatattcaagttggggtcgaaatcgcctcggagcaaaagctgccccggcagagcaggaacgaagctgccgtccacaacgggaccgtaggtgaactgtccccactgggacttggtcgcgacctggtacgcattggccgcgatcaatttggccgaaggcaatttccgggcttgctcaaccgtgctgacattgagaattcctaggaactgttgcagcgtggcttcttgctcctcttcgccaatgactgggacccagcctgggctctgcatgatcgcttgttggaagggtgcagcgccgcgggtgcctccatacgcggtgatctgatgaaggattgatcctgcgccggcagactctcccataactgtgactcgggttgcatctccaccgaacaggtgaatgttcttatacacccagtcaagagcaaatcgttgatcgtgcagcgctgcattggccgtgccattggctgtgatactgtcaccaccaagccagccaaatgcacccaactaagaaattagtattttcacgacagcgacggaaaatgtgtcgttgacttactcgataattcaaggcaacataaacaaccccatcattgtttccctgctgacttcgctggatcaatccggtggggtcggagctgctcttttctccccccacatagcctccaccatagatccacaccagcaccggcgccaagttctttcggaatgctgcggcttcacctttgctgcgttcgaagatcttcttaggcacaatcacatcgaggaataaacagtcctcagtagtgcgtgggtcttgcttcgccggtttgtactcgtaggaagagatgttggtggatagagggaaggatgtattatagaagtagctcaagaggaaggcttcttcggcagttgtcgaccacaacggggctgcctggggacagatctttcccacagagccattctgaatgtgatctctgttttgtttgggaagtacaggcgcctggaatcgcaactcgccaaccgggggtgcggcataacggatgttgctgaagttgtagaggccatgggagttctacttatgtcaggggtaatcaagatcaagctaaagaagagtcaactaacattgaatgagattgcttggtgcagctcatatcccagatcaactacagggagcttggaggccagacaagccgaagccagcgtcaacaacaacacagcgaccatattgacccctgcagagcagaacaaaaacacagggaaaagaggaccactggagcttccaggtttatattaatactagccagaaatcccgaatttatcccggtacaaagtaatctatgttgtatttcatccctacgtccgagtggagaactccgtacggagtatatgattgtccaacagagaacgagatcgacctcgtcatcgcagcttagtcagaggggaaatcggtcctttctatccgattaatatgggcgatgatgtcaaagcgagacattgcttctaacacaccaataagagatgagatcacactgcgctaaatccgggctgagctgcgccatccaggaaattgttggcaccgacttgcggggtactccgggaactacaacataaaaacgcctcgtcagatggagcacgcgatcaattgcctagaacggtgttcatttgttctacggtgaatcatcgacctcgcgaaccttatactcgaacatctggttagagggcacttcatgctcgttctggagtttcgcggcactctcggcgcccgcggctggcacacggtattcgaatcgtttcccacatgctggcacagatccgtcgggcagtgcatatggaaaaggcagatattcgggtaacagacccagttgcacaagtactgttgcctggtcccatgaaatgtgctcatgaaacaagcgatctccgcggatgttgactacagatgtgaatggaacgcggacatattttcccgtaggagggatcccggggattctaggcagatgtcaattaattgctcagctgagccacaggaaccaatcacccacatccagtccatctgcttcacatgagtgaacacaaagataaattcgtccacaattcggtccgtgcctactgtccgactaataagctccaaagctgtgtcgtcggggttgttaaagatgaaatgattgagataaaaatggcttaaacgagctcgtccaatgcctcctgtcagcgttggcacatgattcacgtaaggctctgagaccatcgtcgccattgtcttttcgaccgagcgtgcttcgaattcataataggtgtgctcgtcccagatcttctcgaggtcaaagaacgggccacccgtgtgttttttgacaaatccgacaacccgcgtatgagctactcctgctgtcgatatgttgaaatccggatggcctgggatcatgaagctaggagagcatacatcggagtatatgtgtatagtctgtccttccttcttctcgacttccattggaccagatagctggaaaatggttgactgaaagaagggaatgtgccaagagtcgaagaataccgcggcgatcagagccgtgccttgaaccagtgcaccttggagactttcctcgaattgaggagcataatctttctttgatccataaactggtttgtgtcagtggaggctagtgaaagggccgggttgacacttcgtacctatcaacccaaccttttccttcgtatcacactcgggcctctctgctaagccacactcagcttcttgaagaagctcccgcagagatgatatgttaatagcagacttttcgtccacagtaatctgtgccactgtaaagctttcctccgcccattttttgaggggttctggatcaagcgtcttgttctgctgctggcatgtcgcgtaacaaagaggtcgtatgagaaccagtcctggaccgtgtccacagcgggaaagaggaggatgaatggtcacatatggactcaagtccactggagcggaagataaacttgactcggtcatttcgcactcagaagttggaagttgagcaaatgggggtctccaagtggccggccgatcgttatatgtaccggcctgtcacccccactagtgaggataaggatacaaatcagctatgcaagagatacgctctcaatacgcttgatcggtcagatactcatcatgtaattttgcaatcatcgcatttatctcagagctactatccacgtgacctgtcatcctcggcccgttcatttctacgcgcaagctgtcgctctcccaagagcacaacccaacaatgaacgcacttgttcagtctgcgctgactgatgttgaatctaaactcaatgttcttctgaccagccttacaacctctcccactgctgcaggagcccccgcagcagctatcgccctgctcgatgcggacgatgcgctaacctgcaccattgaaacgcttcgacagcaccaagaaaaccacgcgaatatccttcgactgcgaaacgaggcacaacaattggaggaccgagtcaagggtatcgtgggggatattgaaagcttcgagaaagagatccggactgcttgtggagacaacggcgacagcgacagcgatttcgattccgacgacgacgacgaccttggcggaaagaaatcattactacggggaatcaaggagattgactacaggttactcttggatttcgcacgtcgcatcagcaaatacaaccacgaagcagcagccgatgcagcaacaggcgttgtgaaacgtcaggaacaaggaaatactcccgccgacaaagatgtgacaatgacgggaacaaatggagaacaaccaacagaggaggacgcagagccagtggcatctgtcactaaaaacgcaacgcagtggttggacgagtccgccaatgttacgcgccaggtctacatgctgccctacccgatggaggaacggatacggatgggattaatgggtcaaatccagctttctgctggtgacgatcccgaaaaggaggtggaacggttattgcgcgaagctgaaggtcttggggctgcagaacccccggcacctgtggaacccgccgaaagcacaaagcaggcgggcgaggctgcgaaggctgcagctcaggccggatcatcagctactggaatgccgcgggcgcatgccccagcaccagcaccgaaaccaaagcccaaggcgatgctggaccttgatctctacgaccccgacgaagatgacgattgagtgttttaaagcgggcgttgcattcgattttcataatgataccagctaaacagcaaaaagccattcaaactttttatttttattttttttagccgtgtctcattccacattttgtctgcctcggggcgtttgatccagcttacgagccgaagacttggccgtccatcccccggaatctcttattgcgcagcgaagcgaagcaattaaatcataaactcgtgtagttgttacgtggcggttgtttccccttcgaggacagtctgcaaggtgcactagttcataccataatgagtaactagcactcgtattgaaaagagagtgccaagaaaagatcttacctaattaggttagaccactgtgccaacagtaaaatcgcttcagttctccgattctaaattgatctcactctacaatctattcccatttttgatttcccttgacccaattagacgacaaaagatactcccacaagatataaaaaattagtagtactagtttagttcctacatctacaaggccgaggaaaagaacctgccctggtcaatcgaaagtagtaaaccatggagaaaatttgatgttgaatatcagatcttttcttattttcatagtcgtccatgattactgttgagcaaggcattcaagttgatcggttatcccgtgaaagaagcacactggcactactgtaatatgaattatctatctccatctctctgaagataggagactcgcaatacgagtaaggctacaacggttttgacgatgaatttaacgtgattcccgagtgcaagctacaagttctctgatattatactagaggatcatggtctccttcaatgtacgtcacactttgtggctcatatgcactggtcattcagtattcataaaaaatcttccagatcccaaatgagtttagtagtgtgggtgccatggctttggtatctatattagtcctcggcggtggataggcaagtttattctgaactcaaagggtcctctactcttttcaaagtataagactagaatagttccttccaacaagagattctctgttctctttaccagaccagattttctaagaactgttttattatctccgacaatgtctaaattacctaacaatagtcctccgcaatacgaatcacaccatcaaagccaagataatatacttatcactgtcattcagaatgaaagatgcttccgggaatgggcgcgaaaattgcgggatcttgatcctagattcgagaagttcttcgatagctcatttcaaggcgacttgagatgcccaaaatgtttggagtatgtacttcaagggggccgactacttgatgaaatgacagacttattcagagaggctacgaacatactccaggaaagaacatcacacggccagaatgagctctatgatgccataaaaaagctttctgataccgagcttgatcgcgtctttgcttcttcaaagttgggcacaacatcgcataggcaacctaagctgacttggaaccacaaaaacaatatagacggccatgggaacttcaaatacaagtcatcgagggcacggatgtttttccacgctatccagggggtatgggaacatctcaagggcccgctagtctgagactcttgggatcgacagcttcctgcgagtcgcttttgtttctctaggatggtcctgacggggcattataaagaggagaaaatagcatattggtgtttgcttctgtgatatgttttatgtttctttataccaataccaaacctttacactttggtatatatttcaccgtattctacaatagcgagaaagaggtttgacgttgttcattacccttgctgaattgctagtaatataatccatcggatatgaagtagttgcaatcttgactaagtccttgatatcttactaggcaccgtatatgctacttatcatgccacaaatgtaaatgactacaagactcacctttcatgtaaatacagaacctaccttcgagataagaaacgtttacagcgaacggtgagatctacggattagcacgagaagaaaagccacgcaagcacacatagcaaggatgcgatatataatgaaataagaatacagaagaaaaaaaaaaaaacaaggagcaaaataagaatacaagaaaaactaaagatacaaacaaagtacacaaaaaaactttgtttgtcacatatcctgttttcccttcatctcacctcgctggggttctcggggagaagcaaaactggtgaaacgcccagaggaacgccttggtgccagaggggctcgctcccacccgaattagcgcttgacccagcgttcaaggccccgggcagcacggccagattgctggacggtggtaacagtggcctaggcttcggcggccagggggcgagacagagaagggcccaacggagtgggcctgcagaatttgctatcacaatagctttcatgtcagtaccaatactatctccgcccggactatctcccgccaacgcctgcgctggtgatcagttcgagcttatcgagtgacgaagccttctccaaaaaatctgagaagggcgattgcaggagagcctcatgacgatcctgagaagaaggcctattcatgttcgcagtcgcgatctttggtgtaaggatgaagtgggagatattatgacataagagcgcgggcggaggggatcactagttaactaggctagttagttggttactcgagcagtttctcaagtggttgctcaagtagttactaaagtagttgacgataaagcagttaatattcatatgacaaaagggacttgattttatcagtggtttacatacaaattataggtacctactgccatactactaccatatggcaggaaatatgcctaattgtgaacgcggtactgaaattacaggcagggggagaataagccagtaagagggggcctttgcgtagcattaaaagttggaatcagtcgcttcgctctgcaacgacaatctagagaccttgggccgtcaagattactagtaattagtcgatatgccactgtctatcccgtcggaggattagacctgttaattccagaggacaagttttgtgtcactggtggctccaccgcagaatatactttggcaggcagggttgcctcttcagtctatagtttgacaaataaccgcttttcagtatctaaggtggcttcgtgagccattagaattcaggctaaggacagaacagggctaggaattgctgataattattgatataaaatcaagcatgcaaggtagttcatgtgcaaggcgattttgatagtgaatagccactctattttctaaaatttacctttgccttatatactatcagaaaggcatatcatctcaataactcgctcgcatggctcagtggtagagcgcgtcactcgtagattcaatctggaaatgatgagatccccggttcaatcccgggtgtgagcatatttatttatttttttcgtcttcttcggacaatttgctttataaagccaaatgtgcaggagtttttcactaattagctcgcatggcttagtggtaaagcgcatgactagtactaagtctatcatgagatcctcggttcgactccgagtgtgagcattttttgcctttatttaatctccatctttacatcaaggattgcttcatataagcaaagttttaaaaggttttcattaatcagctcgcatggcttagtggtaaagcgcatgactagtatgaaaagctatcatgagatcctcggttcgactccgagtgtgagcattttttttgcctttgtttgagctttttgactgagtgttttgcggtttcgtgtgagctgctttcaacctttttgagttgtgctttccattatggtagtaggcttatatagacaaaggtgtgtaagttttccaccaatcagctcgcatggcttagtggtaaagcgcatgactagtatgaaaagctatcatgagatcctcggttcgactccgagtgtgagcattttttttgcctttgtttgagctttttgactgagtgttttgcggtttcgtgtgagctgctttcaacctttttgagttgtgctttccattatggtagtaggcttatatagacaaaggtgtgtaagttttccaccaatcagctcgcatggcttagtggtaaagcgcatgactagtatgaaaagctatcatgagatcctcggttcgactccgagtgtgagcattttttgctttttttttataaactccctagtggttgagaattgcggccagcggtggacatacctaaagtagctacagagtagcgagtgtcgatagaatgtgcccgtggtgccgtcctgctctcctcaccgcccttttgtcaaattcgcatgtacctaagcaagacggcaggtacctgcgctttgtatgtaaatcactgacaaatataagtcactattatcacctcttattctatctcaccaacgtcaactgaaaagagataggaatcaggcagatttcgcaatttgttactcaatttgttactacataaccaactaataaggcagaaaataataatacccgatcgcgaaggcgatactttaaatttagcgcttgccacggttaccgcgttatcaaacttatcacagtaggtacatgtacgaagacgtttttagcagtttctgaaacttgttctcctttttaagttaataactcttaatacttataattggtctaacttttccgagtcgaagtttaccatatgtatccgtcataagtgaatccctatcaaaaggttcttttgtatttccaggcttttaacaagaatggagttatataaacatatacacaaatatggaaaaggcttccaccaatcagctcgcatggcttagtggtaaagcgcatgactagtacgaagtctatcatgagatcctcggttcgactccgagtgtgagcatttttttttaactttttggcttgcgcagccttgaagcttttaaacacaaagtcagagagcaagagacgcatttacagcaggcgaacattactgggctatcgaatgtcgagagcggagattgatggatggatggccttaagaaaagaaaatccagtcaaacaggaccaataaaaggacagtcagggctaaatccgtgaaatagaactatacacaggcagagtgcatgacctagccagttctcctgcaacaagtgagcctagaggcgtaaatatgcatggtgacgaaactaatcgggacgcataagacagaccccggggctatgagtgtcttgtatttggggtgcattgaagtcccaggcttgagcactcgcgctctcaaccgccttctgtaggtggaccatgtgactatctatatgtagtagtgttttgagactatagatgcgtagctgaggccaccctgttactacaaactttctacctctctccacaaatctttatcccggcttcgccatcaaacttgtcccgttgttacacttattaggaatatgtagtagtaccgcaccggaggatgctccggaccagttcacctattatctctttcgcttcaaaaggctcaacttggacccaaacatgtctgcgtatgtcggattataattgcggcctgtcggctgggcccttatccttaatcccccacagtgtggaggaagaaatcgatgagcccaatgatgttcgatcgagtcatgatccccggatgtcacctccacaccacgaaacacgcgaacaaagcttggtcgagccagactgtgatagtcacccggaccaatcggaaacaacgatgctttacctatagagtcgatgtaatggaatcttggcacttatctggacaaccccaaaaagcatttaattaggctccggggtcccggtttatgcctggtgtccagaatggcggttctggtcattttgggttctattctgctcagagctcttgaattgcttttttcagatacatcactacaatgagtcactacgaacacccttccttcgatcaagatcagccagatggagatgtggagaagcaggatgacagtgatggagtctgttctgctgggggcactcgtaaggccagccgagcgcaagggagtgcaggtggacgggttagtggagatgaaagagatgagttaaaagaatgggagtgctacgacaagctagggtattccttttcctggtggaaaaaatggactatcatctccgtcatctttgctgtccaaacgtccatgaacttcaatgccagtttctatgccagcagcatcagtctgtacgcgacacacttcaatatctcagagcaggccgcacgtgttggtcagatgggatttctcgttgcttatgcatttggttgcgagttttgggcgcccttcagcgaagagtttggtcgatggccaataatgcagctcagcttgttcttcgtcaatatctggcagatcccctgcgctctggcccctaatttcggcactattgttatctgccgcattctcgggggtctatcctctgccggtggttctgtaactctcgggatggtagcagatatgtgggagccaggtgaccaacaatatgccgtggccttcattgtgctatcatccgtgacaggctcggtcattgccccagtcgtcggaggctttgtggcaaccttccttgactggcattggaatttctggatccagctgatccttggaggcttcgtgcagatattgcacttcttcgttccagagaccaggtgcagcatcctcgtcaccagagaggctaggcgaagacggaaagatggggatatggtatggagtggtgacgagctgaagcaaactcgtatgtccttccgctgggtcttcatggtttgggtccgcccatttattatgttcgcgcgggagcctatcgtcttgttcctctctctcctcagcggtttcagcgattctctcatcttcactttcctccaatcgtatacgccggtatacaagcaatggcacttcaatacgattacaactggacttgctttcctcccgtgagtacccacaaccttgaatttagactaattctgataatctgatcatacagacttttggtgggctatctcattgcctatgtttcattcattccatggatttatcgggattgtaagaaacgagagagagacccagatgctcttcagccagaagctcgtctttattggttgctatatggtacgtattctcaaatctggttcattggtctcatcactcactcgtaacagtggctcctctgttgacaattggtctatttggatttgcgtggactagtctcggtccacctcatgtccattggattgcgcctatgatcttctcagccttgatagccattgctaatgtaagtcatgaaaactcttaccccacgatacaagactgacaagttattctgtgatcaagtatgctatttacatggccacaattgactacatgattgcctcgtatggtccatatgctgcctcagccacgggagggaatggaatggcgcgtgatttcctggctggtattgcagcgatgtattcagtgcccagtaagtgaccataattcctacaacggaatatccactgaccacaaatacagtgtatacaaacatgggtacaacgcatcaccttgaatggccttctactttcttgggcttcatggcaattctcttcaccattccaatatacgtgttctattgggaaggtcctaggattcgagatatgtcaccattcgcgcagaccttggcttctgacagaaagaaggctggccgcagggtttcttcttgtggttccggtgatccagatcccgttgaaaggtatctgtctgaacggtcatcacaagcgaccagaaccagatccggttgaaaggtatctgacatgttcctcgaaataattctatgtctctagcttgctgtggtttgggctgagatttgcatcagaacggcggaaagaaagagtatgaaatcactgacacaggatataattggtttcattgatttctatcttaaaagcttctctttggtgacatttttcgtgctgatcttcgtttctgttgcgttggccttcatcactgcactgctaaactgggaaatatttttgtattatttttgttttgatataatgttacaatggactttattctgggatatacttgctgtcgcacacttacgcttgatgcaagaatgccatcatcccatcatgccctagagtaggggcgattaagtatgtcaccagggcataaatttctcattggatataagccagcgtaattagtatggtatccttagtatattactgcacttcaaaattactacctggcaacattaactagtgagagggttatggcttatgactgcccaatggcatatagtcgcccgtactagagtcatgtcatagctaattcggaaataattcccgatgcagcaccagcagcgatatttactttgtccacaagggtgtttgaaattaaatatagggtatagacgtttagatacagtacagttgatggctcgcaatgtagaaacggaaatcaagtaaaatcattgattccaagaatcctggagttttcgaatggcatattcagtagtccaacccaaatcagcttcgacgccccgtagcagatcaacaataatctgatgttcctcgggattttcaagacactgcccgacagcgacgagaagcgggaccatgaatatgcgaactccaccctgggggcgacccaatgcaatgccgctgacttcacgggcacggaattcgacctctttcgtgacctcccggtacccttgtaagcggtcaaaggctgtggacggtgcactgatcacatctgccggacgattgagcaataatgcgatgcgcccgaaatggtaatgttgcatggcaacagcacaggttgtcaagccatggaatatttcagggaacgacaagtaactcccttcggcagtctttgataaatccttggggcgttcgatccgcacagaagaacggaacgtttctggcacattttcaaaccatgtttgaaattcgaaagatattttgagccaggtatctgtgtccggatacggcagttgggtggcgtttgttgttgtgccttcgggtgaggctgccggcggagatcctgtccactgcgcaagctgtaattgtttagacctggcgaggaagttgatgactttcgtgacaagccagattaacccgttagcagcctgatcttcctgcgatagagttgacccgttccggataatatggaaggatttctggtcgttgattgaaattcctgctgcccgccagaggggcaggttctctgggtcgaaatgtgtaggtgagcgggtaaaataagaaccgagatagtcttggcgggcgaaattccagaaggcagcccgaataccatgagaaaacagggcggatgatgccgaatgtaaactgagaagtgactcaaacaaagggccaatgcgagcaagttgcctggggtctaatgttagtaatagaacagcaactgctaacaagcatctcttacatgtgccattcgtccccgggcatatctaaaagcctatacatggtaagaagcgtagcagacgccaacagctcctctgtctttcgaatgatcgccatgtcgtttggatcttcactcgcgggcttcatggtcgcttgagtctgacgggagctgatccatcgaccaacgatctcaaagggggattccaagatggctgagctagacacagtggtatagccatcggacgtgaggttattcagatccgaagctcctaggtaatagtaattggcagctttgaggaaccagtcaacttgagttgcgtttggataagtttctgtagtcgcagggctcgtgaacattccacccgtggaagccttgacccctttcaagcgagctaggtgtttggctgctagcgctgcaatagcgtacttcacggacagattgctgatggctcgaataggaacatgaacggtaaagaatttttgagaatcggacaaatctagcctattgtattatcaatacgctgcacacgccaagggaaatgtcagtaatacgaaccatggacctatgacctccgagtaatgtcgagtgaggaacgcgatctcgtgttcagttccagtcatgagctccgagaaaatatcctggaattcatctttttcacttcgatgtgatgagctttcggagatgaccctttggtaatcggggcccttatgtggaattggggtgtaggtgttatcaaatgttgggaaacctcctgcggccgcagttggtgagattgacttatatattgtgtttcttgaagattcgctgccttcctcgatgccagagatggagttgtgaatagagatagctgggctttctggggcatgcattgttgtttgctggatactccccatagcaacctctgggcggttagaaggaccaggcatttctactatcatggagtcatctctcgagtccatctgaaaatgaagagccggattatcttgctcctgaggttggttccattgcaaggtctgctcattaggtcctacttgtgagctttttggctgtgtcgggtctgatatcagctctgcggggacgtatcacaaagcatgagtgcttaggcagttggcagtttgacctactttgtttgaattgaatgcagagtttggccttgaatgaggctcctgatatggagcatagcggcgccttactgtggctccctgatcgatgaatttgcgggtctgaacataccccgggcattctacccccgcggtggtgcaccgctgacaatgagggcgagtctcatcacactgccccaagttagcgaaaatctgcacatccaagttcaagaagtcgaactaactttgagatgcctctttttgcaacgctcgcatgccttgttagatggcaccccaggcattgtgggttgcgtgccagtatcgcgatttccagggcttaatgctcagttttcgaggtcatgggagaagctctgcgttgcgtcgttataacacatacagctacttcacatttcgaaaatacatcaggcgaggacgcaatcccagggcaacaaatctagaatgaatgatgcaaggtgcggccaaggcccgcgggctgaaggggggatgacataatatcccgggaatttctcgcttggaactcggaatttggcgacctttttcccttgtacatcctgtcgtcacttgcttcttttctacaaaaaaatcatacaccatgttgcgaacaccgtcaattctcgttgatagacaatatgacacatcttccccattgatccggtatattgaaggccacgatcggatacgttggggctcaatatcttcaacacagccggttctttcaggaccagaacaaatccgcgtatatcgcgaatggattggtgtgtcaccatatcaaattgactagtgaatctggtaactaattctgcagatgctgggagacctcataatatagtatgttgggagtgccgtctccccgacagtctgattggttgccagacctgctgtaggtcctaccatacagcatgtttaatggatgtggttcgctctgcaaataacttccattgtccatcttgccgggcaagagcttgggatcgtacaccacctcagttccccgtgccatctccaaccccaagcactggagggaccccaaacagccattcagacacgtcatctgtaaacatttcaattcgtcgcgatagatcgccaacagcatcacggggtaaatcctcaacggcctcggggatgatgcatccccctactttgaaccgtattgatgaagtcaatgctcgcggtacgccaactgaggtatatcctattgcagagatgtaccctcggcttctggaatatctagcgttaccagatgctgagacagatcgccatgcccaatcgtcacagttcaagcatcaactgggaatggctatgaaagaaattgaatcatatcgggcatcgatgcgagacaagacgaacatccgagaggactattcacgattacagcgcgagaatgcacaaatcaaagcgtatcttgattccagggactcaccgcgagagtctagtattcccagcccttcgacagttccacacagcatcatctcaaaaccggtgtctgaacaaagggtgaaggcttgggacagccttgctattgacatgttttgactgttcgtgtctggctgcacgaagcattttgacgtatactcaacgaggaagttgaagtagtgatgaagagttacaactgcagcaaaagaacaagcattgaatgtcctgaaccctcgattcacccaacacgatcactttcaatggtctcgatatttgccgaacatcttttttcgacgttctagatgcatgttggaaaccgtgcatttcgccgaaaagttcccgaccggtcgtaatttgatcatgtcaccgtcacgctctccatttttgatataatggcgcggagaaggttacatgaagtgaaattgctctcgaaatggacgaatcaacctctggagagactgcgttccccgcatctcggggcaattggcgtcccctcaacctcaacgatcgacaagtcaggaacccggtcattgtggaactcggtcattatcaagtttcttattggatttttcaaccgtcttctctccgtatcttcgggttttcgctccttgacctcttcccaggcggggaatgagcgtggcagggtgtattctgggaccagatacggcagatgtgacaccatttcggtcgagcgtcgatgcaacatccactggggaattgctcccgcatttcattttggcctaagtgcaaggaaccaaggaggtgactggcagtttcctaatttttcctcatttccctcgaagggtacttcgcatgccgatctggcccggaatgcttcccccgcgacttattgccaattcctataaggagcttgaattccgtggaacgcgtcttttctacgtctgaattgtaacctggacagcttttggattattcttgtgtatggctgtagatagtctctggatccattatgctatcacagcatcactccctccacatgtgcatcttcaatggcatcgtaacagccctatatgcatccaacgtgatcgccgcaaagcattcttcggatgactttgacgtcttgaaatatgtcgatcctttgattggcaccgcgaatggaggtttgtcttgaatatgacgagcatttttgtcagcaaaggctgacaattcttacaggccatgtatttgcgggtgcgactttgccatttggtaattcatacgataccctttgttttcatttaacatggctaacaaacgcaggtatggccaaagcggtggcggacactgcaggcgagaatcaagctggttttgcttacgatacggaggttgtgaccggattctcacacatgcatgattctgggactggtggtgtaagttttttgtagactctcggagaatatgccctgtatctgactgatttcacagtccccgtcaatgggaaatttccccatcttcgctcaaggaaattgcccgcatgacgatattaaccagtgcaaatggcaaaaatcggacagagcagctgtctgggacaaagagtctcctgaagttcgtccaggatacttcagcatatcattggcgaatggggtccatgcggaaatgacagccacaaatcgatctgctctatatcggttcacgttcaatgaaacctccagccagtcgctcagtccagtgattcttctggatttgatggatttacctcaatctcgaacaagtggaagtgccgacgtggacagatcgactgggcgtctcacgggaagtggcactttcagcccgagctttggtattggcagttacaagtcatatgtttgcgttgatttcaaaggagcagagcttcgtgatacaggcatctgggagaaaaaccaagcaaacatcagcagtcggtcgctgacactcgggtctgacacatcatccactctctcggctggtacatttgccagattccacgcccccaaagacagcagtattctcgctcgcgttggcgttagcttcataagtgttcaacaggcctgtgagaatgcggagcgagagctacccgactttgacttcgaaggtaccgtttccgctgctgaatctgcttggcgaaagaaattggatgtcgtctccgtggatgcagatggagttttaccagatttacaaacagtcttctggagtggagcataccgagcactcatcagcccgcaagactatactggcgagaaccctctttgggaaagtgacgagccatattatgacagctactattggtgagcaatccccgattcgaaacagatgactagcatgctaatgatacgcccagtatatgggattctttccgcagcattcatccactgctgaccctggttgatcctttctcacaatcccttatgatacgcagcttgatcgatacctatagacatgaagggtatctgcctgattgtcgcatgtcgctttgcaagggattcacacagggcgggtccaacgcagatgtggttatggcagatgcgtatcttaaaaaggttccaggcattgactgggacactgcatatgaagctgttgtcaaggatgcagaggtagagccccaaaattgggatgtggaaggccgcggtggcttgcggagttggaaaaatctcggctatattccttttgatgactatgaccctgatggcgaaggtacgcacacgcggagtatatcacggacggtggaatatgcctacaacgacttttgcattgccgagatggcacagggcatgggccaccagtccgactatgagaaatatacgaaacggtctggaaactgggtccacatgttcaaacccgaccaaaagtcaagcatcaagggggttgataccaacttcaccggattcctacaacctcgatacacgaacggcacatggcgctaccaggacccgatcttgtgtagtcctctcttagacttcaccggatgttacctcaatcccgatggccatgagacttatgaaggtagtgcgtggatgtataccttgtgggtgctcacttgtattttatacttcttgaactcgaaactaacgctttacttacagctatgccccccacgacatgggcgctcttatcaagacacttggcggtgccgaatccttcacctctcgactaagctatctccatgactctggtttgctctacgtgggagatgaacaagccttcctacccgtatatcaattccactactcgggacggccaggtctctcggcaaagcagagccatttctacattccatcccaattcaacacaacagtcaatggtatcgccggtaacgacgatagcggagctatgggatcatttgttgtcctgagcatgatgggcatctggccagtgccgggtcaggacgtttacctgatcactccgccctatttcaaagaagtcagcattcgaaacgccctcactggaaaggtcgcgactatccgcaacatcaatttcgatcctagttacaagtccatctatatccagagtgccaagtggaatgacaaaccgtggacaaagaattggattacccatgactttttcgctgagggtggtgttcttgaacttgagctgggacccaaggaaagtgaatggggaactcagattcaggatctcccgccgagtttgagcgattatcaatgaatagtcgatctgaggagcaactgtggtgagagagtggcatttcgagattgttggcctctctgataagcaggttacttttatcagtatattttatcagtatattcacgacttgacactatgaactatatctctttttgatgtcttttatactgctttttgaaagattttgatactatcattggaagactgtataaaccatactgcatcttcagcataactagtacttgtaaagtaagagtggatatgaaataatactacctggcaatgttgactaatgagagtcatacttagtcgtcatcgtaattcgctgaacctaaggcaaagtgtatcctccatcaataatgaggtttgcacctgtcatatagctagacgcatctgaagcgcagaacacgtaggcctagataagattgtcaattggtttctagggaactagatttgtggaatcgtacccccttcaactcataagattcggccattctcttggcggggatcaagtctagccacttgtcgcgccattctttggggaaggtgaacagaatttcggtagcgatgtatccaggggagatgcaattgactcggcagtagtcaacccactcgacagacaagcacttggcgagctgaacaactcctgccttagacgcattgtactatgcgaggattagcgacatgaaaaaggagtctttccaatagagaacataccgccgattgcttctgtggaagattgaccagagtcgcgctggcagaggccgtgaatataacatttccatgaccctgtgacttgaagatccggccggcagcttgggcagaatagaaagcaccatcaagattgaccttcatgatctcgtgccattgatcgggggtgtagtcttcggcggcagtgttcgaggcaatcccagagttgacgaccatgatatcaagcttcccgaaatccttcgcgacctgctgcacaaccgcctcgatctcagactggacggcaacattggctttatacgctgctgcgcgtacgttgttagtagatgcaatctcggatgcgactgcatcagcggcatcgaatgtgtaatagatcaaggcgacctttgcactttgttagtttgattgttttgtagcatcaggtactccgtagtgtgacttgcatttgcacccgcttcggccaacgctctcgagacttcaagaccaattccacgggcgcctcctgtaatgaagtgttattcgagagacctttataattgggagctaccgtaccagtcacaactgcgaccttgcccgtgaggtcgaatgccttcataacatgctggtttgggggttgtgcgagaaccattatgtcgtattggctgttgcccgcactcgagataataggataaactcaatcgaagattaacagagaagggaggagctgagtctgaaatgtccctcttaatccccgcatctgttcagctctgacgtgtctccaaccattgtggcttcctcctgcagctaaatccagtctaaccctgttgaaggtaattcctggcgaaagcgactagacgctgatgattggaacgccctgtctcactcgatgtccactgagacttttatttttttcgatgttttcggttgttggttcactttctcgttgttctgatttgaaccgtttgcacagctgggtgacgtggttgggtgagaggcattgagatgtcgattcagtttcttgagtcccttgaacaactgcttgttctctctgttgagctcataagcccagaggagagtgagggcttcgtttgactttgtattttccattgtcgaagatggggctcggagaggtggagaggaagagaaggggagctgaggactaagaaagggaaaaggaacaaagacactagaacttcctagaagaatacaaagccatcgattaattaattattattcttctagtgaatttactgacttcaaataattaggtctctactttatctccatttcatagagtatagcaaaaaaaaagaggtgctagacttcatgtgctttgtatctgatcaaatatcaagaagacaccgaatgctcaaagatgttgttcggtttctctccttaatcactcatcgtgtcacattcgtcctcggaatcgacttcggtctgcttggtctgagccttgcagtcatcatccttgtccttgatcgctcgagtatcgtcatcactcctggtggaagcttccatttcatcaagcttctttctcaggcgatctagtctcattctagcagcatggttcgtgatgccaaagtgtctagcgacggctggggcatcaacctgtaagttgatattgttagaattcatggccagatgttcaagtgaggccgaacaaaagaaaataccaacctgaacacctgagatcttatggcaggcccacaggaacaagagctgctttttcaaatcggaatctctaggttcctttggcttggatgggctttttccagcctttgaggctggggttgatttagttggagccatttgaaagtgtaataaccaggtatgagctctttgagtgtgataagtgaagttgtgggagaatagataatagtagtgaagtcgagaatgaacaaggagaggaagtgagagagagatcgagtaggaacctttatattggcatcaatagcaaacaactaagaaagcatgtctctctcaacttacatggataagtacaaacagaaggaaagtacatttagacactttgatcctctataatatatacattattctatcaaattggggtatatgaccataaaaacagaaaaagtcatttgaaaacgctcaggtgaagaatcaaatgccctttgtctttatagactcgaggttcttgactggatgtagaaagataggaggaaggcagagtcgagggttgttcttctcccactgcacacgattagtatcagaatatgtcaagacaagagcaagaactcacctctttggcaccgtcatagcccaaccaggctctgtatagcttctccgaaaactcggagttgaacataaacgtcgtattgtatataatattatcgtgctgaccccagctccagatgctgtcgagcccagcgttgaccttgccaggttctcccgggttgacatgacggttcaactcctcaggatcccatttggcatcatggtaaatcggttgaggaatctggaccgctttcaagccatagtacagagcccaggatataggagacatctcggacgcgagaccaaccccggacttcaccttatccttatgcaacatgccgagaagtcgcgccgagatgcgagacattgctacaacagcggcccagcgtggggtctcttggtcttgagggaaattgaagacacggtcacggaaaggccagtctgtaccaactgggttgaaatgaggcagccaggtgatcagatcggcttcctcacccacaccccagctccctggctcatcttttgggtatggtacaggggggataatagcttgcccttcgatgtcgattccttccgcgggatgagggccccaaacactgctgttgtcatggccaggcatttcctgatccaccttcttcacaaactcttcccaggtgccatgaacagcaggcatatagaagtgagagttgcgctcccacagatacttgcgtggctgctgtttcgcaaactctgttgccttgtgcaaaaggtcgtacatatggccggtataccgcgagtccatctcgaactgccacacgtagtcatactgagggtgtagtcgtgagaagatctgtgtgggctggaaatactgcagtatagctctaatagggtgtcagtaggggcatgtctagctctgaagggccaacacatacacatgaacatcaatcccaggataccagtcattcaacatttcctcgttaaaccataccgccaggctgcgcagttcctgcggcaaatgttttgccttgaatgccttccaggcggcataatcggtctcttcgggcaatttctcgccctggcagtcgatcaggagaataagctcatattctgcacctgagtagagtgacaactccatcagcatggatcgaatgtgatacaagtcattctcggtgtatttcatgccgatccaagagcgcaatatcacggctgtccgggggacggtcttgtctgtttcattcaggtcctcgcgaggctgcacatccgaatctaatgatttgtaaagagcgagtatcttcccttcggatggttgcgtgcgatagcgaatactattgcgctgcagacaatcattttgcaaattggcccagtccacctgctcccagtttatttcagcggcctcgttggaaccgaatgtaccattccaattgtgggttcgagtggtcttgccctcgaggaaaccatatgcaccatatcgggagtagcgatcggcgcagagactgttgttcaaattccacgactcatacgatccaaaagtgggagttgggaaatctatttgacgattagttccccgtcggctcttcaaatcttcctcttcgcacctgaagtattccagcgaaacccgctcatcatcatatcttcatctttgcggctcaggagtcgtccttggggcccaatacacggctggtacgatccctttgacgtcgatttccattccgcactatcatagtgtggataggggtcattgattaattgggccgaaattcgagattgagtggcgtaagcgctcgggaacggatcaacgggttgttctgtagggctgatacagatcagaatggaccaagggagacgagaaaagagggatcttcaattactttgatagcttcacacgcaacggaactactagagcttctctggaatagggaacaataaaaaacaccaggcacagggcggcgatagcgaagcagcgccttggagaaccgaaaaacttccgcagcgccacgaagaaatccattagaatgtgcaaaatctacaaagatgcaaaacattaatctgggagccttgcaagttttgtagctcttgagaatcccccagggctagtggcttggctcggcttatgggttctatcgtgtgtgttgggccaatcgtagagagagaccaacgcgtgtagaccgacagactccgagccaagagaataatgagcagtgtaaaggacagtagagatcattcctatgttacattctttggtctcaattcatgcccttcaaggtgtttccataaattaatgaccttaccttgaccggcgtgacatctcggatcccgccggatctgcttatgttgatcttcgtagccctaattttatgtgctcgtactcgtactcgtcttaatagggatagtgatcgctaggcacatccatatgtactcaaatactaaactaacaagatcgataaaaaccatagctccaatatcagcccacttgacatatgaaaaaaaaaaagaaaaacgcatatatcaaacaggcattccaatatgcttacacgtatcgcatctcttccaaaatcatggggtttgatgtcagtcagtcgcagttcgccgaccccatccactgaagaaccccccaccagtgttattgggtggggcattggccaagctgatccgcgactgcgatactccaacaaaggaatggcgggtttcaataatatttaccccctgggaggtcttgagcattctccgcaatgaatcgtacttgccttttacttcctcaagctcttgccgagcaactgcctcggccgtcttggcagtaaccaactccatcagcaacgtctcttcggcggcaggtctgttattctccgtcgacaaaacggtctggagacccaggctgcttgtccgtctgttatatgtggggctttttgtggagctggtgcgggagagcttgaactcgcgcagaccactagtgggagattgagactcgccagactcaatcgcagaatacgttgtgtctagcggcgtttccgatataggagttttgaggatccgcagctcccggttcatacgctcgagccgctgtcgctcccgatacccgtcttgaatccggccccgagcttctcgtaattgctctttgagggacgagttctcctgttcaaaatcgtcgatgcgccgggtgaggttcaagcaacgaccggcttccacctcgtgcatttccttccatcgagcaacatcgtcattgagctggagcttggtctgggtgattgaaatacgcttcggttggacggattcaaaacgtgcttcggctttcgttactaactcggccggttgtgtctcagccggctgttctctaatttgattcaacatctccttggccagggtgtggtcttcctctcgctcttctctctcctgttgcagttcacgtgtgaggttagcttgttggcgttgaagatcgctgagggccatcagaagttcttcaatctgggtatggaggtcgcggtctttgtgatgtgaagacatggtggatttcgcgcgcggtttttgattatcgacgctagctacaggcgctgatagttcggtcgcagcagtacttgcgtccgacgtagtttcaatagagttgagagtggaagtcaggctctgcttggaggtagagcgacgaatgttctgacttgacgggctactattcggactgagtgacttgaccgaattgtgggagtttgatgagccagcccataaccgcccaaggaagccagatgccgttgcctgcatctgcggaaaggagggtccggagggtgagcctttcgattggttatagctggcttcaagcttttggagactttcattcgtcacgagagaggtgagagacacgaagtcattgacgagatcatcagcattgaaggcgtatctgaatatcacgggttagccgagttctttgtttagaagatgtgctttgtgcaatgtccaaaacttacgtgtcccacaagcttcgagataataatagttgcatcacatcctcgaattcgctgcaagccaaaattctcttttcgttgcgttgcatcagagaaagcgcaactcgcatcaaagtctcgcatgcgccttccaaaaagataacatcataaattcggagaagcatagggagcggacaagccaccgcaaagaatgagaggaaccactgcgatacgtagaccggctcaacgtgcagtgcttcgagatgttggaacaggaccggcctgtgccgtgccaaaagattttggaattgataaacatgaaggtgaagacccgaaagatctggaagatagcaacttcgcaggttatagtgatccatgaggctacaatatgttattagtacttctccaagtcatatcatcgcccaaggagacttaccggacaagaacacaaaaggcctccgcatctgtcatgtgcatgagcagggggcccaccacgaatccaagaccttgacagtagccaatcttagtatcgtacagactaaaacatcgcaatacacggccgagcatttgttgaccctcgccgttcgggtcgcgaaacattgcaacattgggaaagctgcgaccaatatcttttccgatcagcccgtcgtacggactgctttcgcccgaaagcctttggaattcattcaatagatgaggatcgcgtgcgcccgctaggctaggccacacaactcctcgcaatggcggaggaacacccccttggatcttattcgaggtcaatgtcggcaaacgctgggcagtccggtggtaatcggcaaccagtgcagcccaaaactccaactcggtcattggaggagggggtaactgcgagtatcgcagctctgcccgagcgggatcccgaatgagtcgcttgatatggtgtagtgactcggagcgggactgccgctggtatttgtcatgaggaacctcggatatccccgatttggggttggtcaccaacgcattgttttcttgttcgagtcgagcgaggagcagggctgtggactaaaattaggccaagaatgttagcactcattctagaattccgcgaaaaagcttgtcacacttacttcatcggacccctctccacgcggttcttgttcttctgtcttatccagcttctcccaattcacctcattgtcaaacatttccttagtctttcccgccttatctgcgcttgtggtttcgggagtcggggtggtcctcgctgcgtcccgtaatggcattggcccaaaggaatcctcactctccttctcgagatgagtcatctccactggggttggaggaatttcaagagtgcgccaatccggttgggtgtgctctgaactggactggttatcggacaacgcgacggtgaccattgagtcatggttcggcgcgtaaccaacgctcgaagatgttggctcgaaaccttccattattgtgaatattgtgacgtgattgagaatcgagtatgtgactgggggttgcaggatgtagacgcgttattgttgacaatgttgatatcggacagggttattttaggcgggtttcaactgcattgcggatctcttcacaatttcgagtattcaagaaaacggattctttccagcagaagtgggacctggatatgattctaaacttgtatccagtacaagaagaaaaggctggagaaagaaaaaagggagtcaggagagatcccacctatttcgttagcccccctttacctttcccctcgtgtagtctcggccccgtcgatcatcctcatacaccgactgtttgaccattgaaatagatagattatgggatcttggaggaaacggctacagatattgtgactacgctgtaaattgtatgaatgtagttaagaagggccaattccatcgctcttcacccatcagagttccccgacatcaaccgaaattggtatcggagggatttcgagtccattacggagtattgcatgttccaattatacatacataggactcagatacttgaagtcatctgaatgtctcaagtttagttatttcaactgcatattgcctgcaggtacatagtacagcctctcatatttgaaagaccaaaggccaaaggggtaccgtcattgtacaccgttatatctttgatacataaaaatatccatctgtaatctttcgtagctctgattggttgatatcttaaatatagccgaattgattggtcgcgcccctagcggagattgaaatacaattaccacccctggcttgtccgttcacctcaatattgaggctggccaacgttgttgtacttcggacaccgtatcattaactcattcgtaaatgacttgacacagacttctttctacctatattgtaggtttctgaaccacccctgggcctcacaccatcgactattcccagagatccacagagtgaggtccatgcggtccgcctgtcagacctgggtggtcttccaatccacctttcgaggtttcaaggagtttctcggatatgttttcagagtggcgttaatggctgtctatattcatccagaactccgtacctgtatccactagaaagaatttcgggatgatagaatgacgtgtcatagcatatgactttaaccaactacataactagtgataaagagggatgtgcactgtgggcaatctggtctccctagacaagaccaggggtgatagggtgatagagagaataccaggggttgctctagaataataatggaaggtggaaagtgggaagtgtctgtattgcagtcttacagtgttcgttgtaatttctaaacatccaatcttctccaagcgcccggacaagccgaacagttgatgaaaatgagttcgcgtcgatcggggatagtgtaagcccaatgacactgtgcaacgaggcatgtgcaagcacagaggccaagtcgcgaggtcaaatattggaataatcatgacgttctgcaatacagaactatcagcgattgaactgataagaacagatactacacttgatctaagccagaggcaaagagagctgaagaagaaggaaaagaaaaggaagttctgggggcagggccaccttcttataggtatcctaagggcggtcggtttatgccactattcacaaatgagacaaacaacgacnnnnnnnnnnnnnnnnnnnnnnnnnnnnnnnnnnnnnnnnnnnnnnnnnnnnnnnnnnnnnnnnnnnnnnnnnnnnnnnnnnnnnnnnnnnnnnnnnnnnnnnnnnnnnnnnnnnnnnnnnnnnnnnnnnnnnnnnnnnnnnnnnnnnnacacttgatctaagccagaggcaaagagagctgaagaagaaagaaaagaagaagaagttctgggggcagggccaccttcttataggtatcctaagggcggtcggtttatgccactattcacacatgagacaaacaacgacatatgctcgcttaattgaatatgtaaatggtaacgtgatgatagagataatcaatgttgataaggtagatagctggataccataggcaaggatatctctttgatgtgtgttacttattggtagtgacaggcacacaatgtgtcctcatagtcactttatatcaagtacaacgctatggatatgggaaatttaagcctcacctacctacatcctagagggagaaatagattctagtcagatctgacatttgaaggagtctagttactccatacttgctctggtttcacccacatttagactcaactccgtattggcgctaacttcattgtgacatttgggtaaacgacagggatgtcatgtcagagatactaatcatgcagtctataaatctgtagatagctgtttctatctcatcttctgcgaattggaactgcctgttttccctcgtttgtttgtgaattgcctatttgggtcacatttacaggcggtgaggaagaattatcatccgagtggttacaaactgcccaccgccccctgtcagtcgcgacttccccgggcaaaaaaacaacaggcgcttcccctccgcgttttatctcatttctcctcttttgcctctcgctttaatcatttccgacttgagcatgctggagcttcattgattcgctctttggcattgaaagatagcgtcattcgttcgcttcaactctgaggcctggcttgggctctttccttcccccgtagcgctctatcaccctccatctaatcactcacttctatcatggatgactctatgaacgaggactcggtcttcgatgatgatggaggcagctctgactttgcccctgagcctgcaccggtatgaactttcatcaatatactaacaccagactcaactttaattgctgacattatacgtccccagaaacccaaacccaaggcggcccctaagaaagctgctgccaaacccgccgctaaaaagaccactcagacaacactaaaggtcaagcctgctgcaaaggcagctgccactaagaagaaggttaaggcggacagcgaggacgaagtgtccgatattcagatgtccgatgcggattctctgctctcccatacccctccaaaggccaagaaaacggctgcgcccaagagagctggctcaaaacctctggccgatgttgaaaatgagtctcacggaggagacactgctgccgacagcgcgagtaagagtgtgaatgcatctgataagtaccagaaagtaagtcccctacagcttctaacatggtataattttggccgaatacttatatcaattcttaaacgcagctcacccaacttgaacacattatcaaacgtcccgatacctacattggatccaccgaacgcaccacgcagcagatgtgggtgtacaactccgtaaccgagtcgatggagtaccgcgatgtctctttcgtccccggtctctacaaaatcttcgacgagattgtggtcaacgccgccgataacaagcacaacgacgagaacatgagcgagatgcggatcaccattgaccgcgaggccggtgaaatcagcgtgtggaacaacggacgtggtatccctattgagatacactccaaagagaagatctacgtacccgaacttatcttcggccatctgcttacttcctccaactacgacgatagccaacagaaggtgactggaggtcgcaacggcttcggtgccaagctttgtaacgtcttctcgacagagttcaatctcgaaacccaggactcccgtcagaagaagaaatacaagcaaacatggacccagaacatgacgaagatgggcaaggcaaagattacagatgccaagggagatgattacaccaaagtcactttcaagccagactttgccaggttcggtatggatggcatcgacgacgacttcgaagcccttgtcaagcgccgagtctacgatttggcaggtacggccaatgttgctgtcaagttaaacggcacacgcgtccccattcgcagtttccgaaaatacatggaaatgtacaccaaagccattcgcaaggagcgcggtgatgatggtcctccctccaaggatgaaattattacatgtagccctgaccctcgatgggagattggttttgccgtttcggatggttcattccaacaagtctcgtttgtcaactcgatcgcgacaacctcaggcggaacgcacgtcaactacatcgccgatcagatttgtacccgcttgtccgaccaggtgaagaagaaaaacaagtctggagcaactctgaagtcagcgcagattcggaaccacatcttcatttttgtaaaggccttgattgtcaacccggcattcacctcccagaccaaggaacaattgacgacaaaggcgagtcagttcggtagcaaatgcccccttgatgaagatttctataagaaggtcttgaagactgaggttatgtcaaatattttgcactacgcggagcaaagggccgaccagatcttgaagaagggtgataccggccgacgcacgcgtatgaacaacccgaagttggtcgacgccaacaaggctggtacaagagagggtcaccactgcaccctcattttgactgagggtgaatcagccaagggattggccatggcaggcagagcagtcgttgggccagacttgtttggtgttttccccctgcgcggaaagcttcttaatgtccgcgatgcttcttttgaccaaatctcaaagaacgtggaaattcagagcatcaagaacttcattggtctgcagcacaagaaggagtacaccgagaccaagggactgcgatatggccatcttatgatcatgactgatcaagatcacgacggtagtcatatcaagggtttgctcatcaatttccttcaagcgcagttccctagcttgctcaagattcctgagttcctcattgagttcatcactcctatcatcaaggtttggaagggtgacccaaagaacccgaccaaacagaaatcgttcttcaccatgcccgaacatgacgaatggcgtgaagcccacaaacacgaacgcggctgggaacacaagtactacaagggtttgggaaccagcaccacagaagatgcacaggtttatttccgcgacctcgatcgccacctcaaggagtttcacaccatgcaagacggtgaagccggactcatcgagctggctttctccaaaaagaaggctgatgagcgtaaagagtggcttcgtcaatacaaacctggcacattcctggatcattcagtggcgaagatcacatacaccgacttcatcaacaaggagctcatcctgttcagtatggcggataaccaacgctcgattccttccgttgtcgatggattgaagcccggtcagcgcaaggtgcttcacacctgtttccgtcgcaacttgaagaaggacatgaaggtagttgagctggcaggccatgtatccggaatgacagcctaccaccacggtgacgtctcccttcagcagactatcgttggccttgctcagacctttgttggctccaacaatatcaactgcctggagcctagtggaaactttggtagtcgacttcaaggtggtggcgattgtgccagtgctcgttacatctacactcgcctatctccctttgcacgcaaggtcttccatatggccgatgaaccattactaacttacaacgaagatgatggcaagaagatcgagcccgaggtctttgtgcccgtcgtcccgatgattttgatcaacggcgcggatggtattggaactggttggagttcttctatccccaattataatcctgaggatattgtcaacaatctcaagcgcctgatggctggcgagccgactcagccgatgcagccttggttccgtgggttcaccggtgaggttgtagccgtcggtggggatcgcttcaaattcagcggtatcatcagggaatgtggtgataaggaggtcgagatcaccgaattgcctattcgaacctggacccaggatttcaaggacaagcttgaggatatcattaaggctgagaaggtgccatccttcatcaaggattacagggactacaacactcacaccaaggtccacttcatcatccaactagatgagaaacacatgcaggctgctctgactgaaggcttagaagaaaaattcaagctgaccaagtcgattgcaacaaccaatctagtggctttcgatcccgagggccgcatcaccaagtacgccactgtcgatgacattctcaaggagttctatgttgtccgtctcaagtattacgagcgacggaagcagttccaacttgccgaactacaaagagatctggagaagctgagcaaccaagctcgcttcgtgaagatgattattgaaggcaaattagtcatctccaagaagaaaaagcctgttctcatcacggagttgaaggaaaagggcttcaagcccattgccaaggtggctgaggccgctaagatgggcgaagatgagcctgtggtagaagaaggagaagaggagttggatgaaactgacactcaagtgctatccagctcatttgactaccttctgggtatgcctatgtggtcgctgacccaagagcgcgtggacaagctccttcgccagattggcgacaaggaagcagaagtcgacgtcttaatcaagctgtccaaggaggacatctggacccacgatttggaggagttcatcaaggagtggcgcttccagcttgaggatgaggaccgtcgcgcccgcaaggtggctagcctggaccgtcgtgtctcgactaagctggccactggtggtggtcgcgctgcggcttcgcgcaagcgtaaggttgctgctggtggtgatgacccagacgacgaagacttcggggcccctaagacaaagaaggccgccgcagcaaagaaaaaagagcaacccaaaaacagcttgatgaatttcctcagtcaacctccaaaatcaaccccatcggccgcaccagacggaactgactcggacgatgaattcaacatggacatggagatacttccgaagaagagccgtgctacctcaaagcctaagactctgcctaaagaagaagacgactttttcgatatcgacaacattccccagacctcgcaggcatcagctcagccagttgatgatccgatggacgtagatgtggatgaggtgccaaagcccaaaccggcagccaaagcaggggctaaggcagcggccaaaccggcagctaagcgaggacctaagcctaaggctaaggtcgatgaggattcggatgacgatttcttggagattgccaaatccgaggcttccaagcccgcagtgcagtcctctcgcgctcgcaaacctgtgaaatactcagcgcctagcgattctgacagtgacaacggtgatgatcttcttggagacgtcagcatgatggtcaaaggcattggtgctgactcgggcgccgattctcgacaactattctcggagcgcccccgttcggaaagcagttccagcgtgaagactgccgcgaagtctcccaaggtcaacgacgattttgatccggatgagactgactacagcaagcttattcctcaaaattccccacgacgctccatccaggtcaagcccaaggacgtcaagctcgataacaacgatgaagatgacgaggaggaccagccggtcaagacaaatgctcgggccaaggctgctcccaaatccaaagctgccctcaaggtcgtcgatgatgaggacgaggaggagccagtcaagacaactgctcgagcgaaggctgctcccaaatccaaggctgcccccaaggtcgtcgatgatgatgaggaggacgacgacgagccgatcaagccgactgctcggggtaaagctgcacccagagctaaagctgccccgaaagccgctgctgccacctcggcaccaaaggcccgtggtcgcccaaagaaagagccagctgcgactccgaagcccgctcccaagtctgctcccccggctttatccccggcggccaatgcatatggttctaagcacagcaaggcaagcaagaggatcgcggatgattattcggaggatgacatcgacgcaatggctaatgacattttggattccccggcgggcaaagtgaatgtggatatttcagaggacgacgagccggctcccgccccccgtcgcgccgctgcaggccgtcctgctcgtggcgccgtacagcagaagaagtcctatgtcattgaggatgatagcgatgaagaagcatcggctgatgactttgacgaagacgaagatgagagcgactaagtagtgaaatagtgagggtcggaagcccatttgcgatgttctgctttttttttttgcgacgctctttattctggtttttattttctttcatttccatgtcttactttattggtattttatggagatctggcagagccagtggatgcaaggcgaatatgcgatgttcaatcttacttttctatgcgtaaatctttcaaccgtagcctcgaataggctgtttggaactccacagtgtcaactaatccatcgaggccttcaattctgtttcatacaaatctaataaagggacactgacttgaataagcaaaccctcaactcccaagttatcaaatcacacaaatgttcctcacaaaatgcatagagacaacaccaccagcaaaatcttcagctcctagaccataaacgccgttccatgtcaagttcgtagcgtaatcgactatcaaagcgaagctcgacgtcgcttacgactccgaaattcgtccccatcgagagagcgagtgccggaaagaggggtcaactcgtcatcatccatgtcagtctcggttccgatgctttcaagctcattcatgtgcagacgaaggagagcttcagcagcctttacttcacggttgaagtgagccgacggctgaagacgcagagctcgggactttcggctggggtacttcttagtctgggattcggggctgataggaccgtccttcgtaaaagaagctcccctaggggtcctcttcagagggggtccacggtagtcttcatcatcagcatcgtccatttgccaatcatcatccgaatcggtttcatcatagtcgctttgcatggtagcgacatccgaagcggtgttggtgggctggtcgaggccaccgagcttgtcggtttccatatgcccgtccatagaaggacagtttggggtagaatacacgttggacgagccatcgctgtcggtgtcactgtcttcgctgaccccagggacattctccgggcgcatagcatctgagatggcacgaagaatcgtccgaggcgattcgaaccgcgagcgaggtatcacattggagctgcgcggggggttgatgggcgtaaaggcagacatagacgactggctcttgggcgacatgcagtaaggctccatggaggagtcccgggcgctgggatcactctcagcgtaatgggtgcgcggaatcttgagtggaggcagtttcaaggacgagtcttgtcggcttaatgctcctataccatggagaagggtatgggttgaggaaggggtactgattgcgggagggctgcctccggtgctagagctagacttcgtctccaaagagcgatagtagttggaggtgtgggtggcacgctgtacgatctctggagggatgaccatgcggccgtgggtcttgcggtccgttggggggatacacatggctgggaagtctgtgccaaacagtggagtcagggcgtatcggattctccagcagaaggttgctgccatggctttggcggcttcgtagggcatccagtatcctatgtgaaaagtgaaagtgttagaatcacccaaggttcttttggatgagaagaggatatcgatcttaccttgagcagaaagtgctccaccggtgatgctgtgacagatatcgcgcaggccggggttctggttcagcatcttggctggcatggtctatagtgagttagagataccaaacatatcgaagatctatcgtatgaacttgccttggggtagccattgcatttgaaaaggtgtgtaatccgaacaataccgatgttgtagtcccacataacatgccattccttgtcttcgccgggtatttggaaagtatattgaaatactagatgaaagagtcagacgtgaataccaaaacatgctcaatggcacataccatggaagctatctcggccggtcttctcttggaaggttttcttgtcgctggcataagggatatgacgaggatagtcggcaatgttgcccatgggacgtaacgagagctctctgtgagccttctccagatctgcatctctttcctcgcaaggaggatagcggcactcgccctggatcttgccacggcggaaaattggggcgtccttggccatctttcgcttctcttggacagggaaaggcgggtaaggaattcgcctttcgggctgaggattcagaagggagttgatagatagcattaagaagttcaagtgctatccttgagagaagaaaagagttgaagaaatacgaagactctagaggaaagaagcagcttaatgtctctttggaacaaaaggtgttttccagaaggatgaaagacagaacagtcaaacatgcaagaaaaaaaacaaagtagagcaagacaattcaagacctttgttcaaaggtttgatgtttgttccgcgcagcttctaaaggtgaggtaaggtgagtcaatacagatgttgtttgttggtaaagtcaactttcgaggagacagacagcggtgaatagaagaaactcggatctgagagttgtcttacacgaagaatggtaaatgggcttcaccgattctttgcctctctcttttctctccgcctctctcatatcacaagagtgaagtcggacgagtccatgggctgtttgtctctccgcgtggaagggaaagttcccaatgatcttacactttggactgatgatgcagtgtacattgatttcattgatatccctggaaacaattacaaaatacagatattgagacttgtctctcatctctcgaggcatagcctgttctacattcacacctgcaacttcccaagcctctaaagtgatccgtgaaagaaaagcatggcagcaaccgtttcaggaaccgtgaaaacgcagtcaccgcatgcaaacagcctgctacgcacaaaggtgcctaatattatcctcaattatgatgtaaatgctaatatcctggggtagagagctcaaccgttgtcccaccatctttctttttcttcagaatcttatcggagaacgcatgccagatcttccttgtcattggactggagggtactgagcaaccggagcattaggacaacagtccaatggcccaataagaagctacatactccatagctcggcaggatgaacattaaagaggtctcaggctcacgggaagctgcagggcttgtatgacaggaagctgcattgcctaacgagtccgcgaagtgcatctgagaaaagctgtgctgcacagataaacttctgacagaattaacgatactgggaaaagtgacagtaatctctccacttgcgtgtcacgcttccttgcctacacagtgtaccctagactgtgcaagcggtctataaatttgatatgatgggggtaaggctgaggatacaaaaaaatgctgatcatagactagaatgttctttattgtctattaaatgcaggtttgcacctcggttcttctctttttgtcttggttaatgtctatttgaaactatccgaattctcagctagaccgctggttgaaatcccagggcgtgggtataacagagacatggactctgcggagacgcaagagacataacgacttcaaagaatattccatgcatccttctatgcagtattccgacacgttggtggctgctagagcccacttttcctttctttatctttgggttttcttttctgcttgaatcaatcaacttataccagtgtcacagtgacttcccccagtccgtttcgcaatccgccattgtacccacctgccagtctagtgtagtctgcataagacttccaacaggtacaagggtccttccgccaatcggtgccgggccggggtagcatcctgagcactgcagaaaacggtgcatatagatgccggcaggacgctacgcaatctagccagagactgtaaatatcgaggactggggtttcaactagatgtcaacccaactgggctagtttcgagtgggatgggttcaattgcattggagtcggtctgcacagagtcccaacagccgagaccgctacgagagtctggaaacgaggactggtttccaatgtcttagacactctgctgctggctaaacatcctccgtcaaatcacaaagagcggtaaaccgcgacatgcgtgtcccctcagcgtctcagatcccggacttctggaaaaggggcaagaagccatgtctcaattgggatgctgctgttggtgtttaggcctttctcaagcagctattttcatgcctattcatttccataaagtatgatcgagcttattcgtaacatcgactctttcaggttgcccttgggcttccttctttcacgtgtttatcgaaaagtcggactcattgttcacatcagagctggacactcttggagatgatgtggtatcattacagtaggtctcagactcaacggtgaaaagagaacacaccaagcgtcatactcgcatgagcctgcaagactcggtactaaatccatgtctcaaccaggtgaaagactgacttctatcacaaagaggtccagacctcgacccgttgaacacagaataccaaccggacccgaaccttgagtccagacgctcaagattcacaagatactcctcgcccgcagagatcagacaacaacccggaatctgtaccacagcgaatccggggtatacggggtgtgagaggtgaagggaaacacagtcccgagcacgactgaacaaggcaagtcttcgagggagaggggaagtacaatgagatggaaaacaaaaccgtcacaggctggtccgaattgcaatatgacgaaaagggagccgggttgattgttcctcatattgagatggagaaagagcaaacctctacggctgtatgggtctacaacatagtaaatattcatgcctcaacggaaacatctccatgcgaatccattgttaaagatccctgctccaacaattctctgattttgaagttctgactgcatcatgctatcagttctcccaggcgcgtgaacagctcaacttccatccgctcagccgcatctggctggctaagaatttcgcccatcgggtcttctccaagatcctcctcccatactgtctggggctctgcattgaccttcagactcttgtacaggcacatccgtaggtgccaacgaaggaggttggcgctcacacgcagggttccactcagagcagagtttctaagacgagtgccaccaattcccgtagtatccgttacgaatacgatgatcttgtagtcggcctatgtcacaaccattagtatatatcggtagggtcttacatcggggtcaattcctatttcaaaagcatcgaagtgggtatggatgtcggagcggagaagaagcccattctggggagaataaaggccagattccccaatctcgctactaggcctagtgtcggtaatgtaccgccgatatcgatttcgttgccattcatccacattactaactgggaatacatgcgtagcttcgagacctcggaaaggactccgacggctggctatagcattcggcccagtaattgcacatgcggcgtctctagtgcggaggctgttgcgaaatttattctgctgtagaaattattagtactggttttgtatgcttaatcatttacacattccctctgaccctgggattgggaatcggcactttgagttctgacacggcgtggcgcgcaatttggtattagattgatgatgatgggcgcgtgatctatacgattgtcaaccttggaaacgccagttatgctagatgtgtcaaaaatacttagatctagagccacatagttaccaggattcaccaaactcgcactgttatgctggagtgcagtgtttatctggtgtgttattggcttgcaacttataaattgcccactcgttttggttaggggagatgaacaacaaccaacaatagcgacatagcatctcctcggagatatatcgagcttgttggacagttgggatttccagggctataacaaggctgtattagtcgcactggctcctataaggctatcgtgacttaccggcaagaagatggccgtcgctgtcatatatctggaggtaccttggtgtttcaagaacaagagctggcatagctgctgtcatattggagttgatgaaaagagaaagagaaaaatgaaaacaattgatagaaggcgactatacttcccgattaggttagcttggctctgatgtcatccttagattcctcgggtgtctgtggtgctaagtcttgcaaagatagaagtgttttcaatgcagaataactaagatggagagaaagaagaagcaagttgcaaagtgagaagcagcctgttgatatagctatccctttgcaaacatcgcaaccctcgagcccttctcttagctagcaaacaataagaaaagcgaaggtaagatcatgaatttatgtaaatgtagttccattagaaacaatatgaacccgaaaaagacatagacagggtgtttgcggaaaagaactagacaggtaaaaatgcccagtatgttagggggaataaaataacgaaaagaggcaatatgagacatgaaaaactcattcatcgctccaagaatcctccttattttttgtccgtcgacacgaggaattggtgatcagagcgcatgtattcccaaggaatccccaacaagaacaattgacttgacaaccgatatcacgtgccatttggtacatccagcaacagtcatggccagaataatgatatgcattcaccaaagaattgattgacgctcaagttcgaggccaattaacattcccggttaagatggcctagtactattaagacctattcagatagccagaagaggctcacgacccttcgcctgctctgccggctcaacagacgcaacaatgccagactcgagagcctgagcgacaggagcggccttgggggcctccgggaagtcctcgtgcttgataacgggctcgacggcaggcttggcgacaggggcagtgaagttggcagcgggctcaacggtctcacgcttgatcgggctcgcaagcttggtctcccgggaggcagagcgtcggtgggcgatgtaaccttgagccttagagctgtactcaccgacatactgcttcaccaagtcggtggcgtgagaggtacgctcgccagccatgtctcgaagctggttggtctgggagttgatgatttcctggtagttggtaatctgctcgtcgatgaattcacggttgctgatgtagatcaggggggtgaagtatgtggtggtcacggcaatcaaggccacgccccagaagggaaggaaacggagcagccagtagccgatgaaagcagcattgaaagcctaagccgttagtctctgcctttttatcttcgttgataagttcaaagttgcaacctacaaaaacggtgtggaggacattctcagcgaacaggatgcgctggaactcgatcaagaaaaagtccacgagctgctcgaggtcctcgaggacaccctcaataacctccttggggacagtgtagtaacggcgggggcggaatccactggcgattccccgcttgaggataagatggccagcaatctcgacagtggcggtcactaaacacaattgttaaccaaccactctgttgaccgtaggtcacgcgaccaactcacctcccaacgacatgtacaggaacttgaaggcccagcggaggagaggcatgtaacgagcggcgaagatgaaacagatcatgctggcgtaggaaacggcggtcgcacggggttgttcccactatatccagagaaagattagcaagctatccaacttgaagactcgggcgacaactcacgctcaaaaggctgtacatcaaagagtggtagtctagacacttgtcaatatcccatcacccaattaatccagttcttatgacctacgagtcaatggttgaccatcggcggtggtgttcgaaggggtcacacgcgagtttttcagatcgcggaactcatcgctggtgcgggatgcttcggacttcacattattgacaattgggcctgtggatgaactagtcagcttgctttgatcgactttcggagactttcagacgcctgcttacccttggtaataacatcgcggatgcctgaacgcaaaagggtcaaggtcagtctctcccacgaaatctagggaaaagaaaagagcgcaatactgtggggtgactgaggttagcatattcatgttgtcgaatggaattgacttggttctcttaccttactgcccgtgttagggtaggtcacgtcaccagaagccataacggtgagattgtgagaagcacttcagggggaaactttaaaaacggaattagaaaattcgtaagaagcgtatcaaccgagtcaagacgtgaaatgcagaaaagaaattaaaggggggaagggggagaagaagaggaagagaaggtgagagcacagaaaagataaggaaggattctcgacttccaggttgttgtgatgctgtcatgtgcgctgccaagccccgaacagctctggattcagggcatttgtcttatgacgaatatctacctgggaacatgtcttataaggagtacattcactggaaataccttttattgggaggggataactggaaaatacatagtctgaccttacaagtatgtttgttgtacatatcaggccactccgagactattgtgtcttgaacgccataccccaaagctatatatactccacacaatgtcgatgtacaacatagctatgacttcatacacaaccaatcacaactagttccctaaccttgagctctgatgcaatactctatcctacccagctgtaccccagaatccaaagtataagctttaagactgatttctgaatcgatttcgcttccatgttgggtaaggaccgtaaggtattccaacatatgatcgccaatccccgctagcatatttagcctcatcgggtccgaattcggtaataatctgctattgatctgttattagaaatggcattatattaggagtatcctaggtttcacttttctactttcttctaagtcggctatgacaaaacaaacgtggcaggtcattcaacagtacttcggttgccctaatggaaaagcaggtagctcccccattttctgccttgatatcttgagaccatcaccaagacatcggagtatagtacttctcccaatgaataggcgtatcagccttctggaacttttccatccctccagaaacgccatcctccgtgaccacccaatcacccaactcaacacgctctgcccaactcgtcaataatccaagaactgccaatgaccccatacagggagaagcccagagtagcagataatttgatatagctgatcggcttcatcggtaagtaggggaggattcgaagacggaccaagtagcaggtcgttgctacttcgcgcatagccattcgcaccgataccaaacggtaaaagtagcttacactgatttccatagtcttgcgctatatcttctatgtaaagatcagtagggataaactctagttccccatcagggaaccagggtccaacctaaggggatttgctctctccctcacctctgaatagaagcagaggaattggatccttctcgttatagtcgatcctgttactcaaatcagagaaaagcttgggaaaaggctgatctgcaatatctgacggcgattggagttgaactccgggagcgatatatcggaacgaaagacgtcgattcggaagagcgagaagaaacgatcggagaaaagtgtcctcttttatataagcctcgccgaggaccgcggtaggatataaaagatctatctgggtctggagcgatggtagcgtaaacttggagtcactgggaagtttttgctcaatagcgtcgataagtcgaacaaaaacggccactgctctttcaacgtcacgctttgtgaaagtttcaaaattccatgaaaagaatttcgaaggcgttgaagacgtgtacacttttctatcttcaatcatctgaaggtacactgtaagaatatcctgtagaggtctccattgccatgatttatcgcaatcgcaaatcagactttcccagtctggaaaaaaagctgtaagctctgtacctctgatcgaagctaacttatagttagaatagaatagtgatataggacaagttgatcacgaacatgatactaacttcttcaacatcgaccgccccggtagccggatataaccaaacaaaacgatcaccccatgttttgagggttgaggaataaaaaaacgtgtttgctcctgtaaactatgcaaaaaataaaagaagcagagacctgagcctattaccggggcagaaactaccttcgccagacgtaggaacgaaaccagattcggaatcagacgggaatcaatttcaacgggagcggaagtttgccaccaactagtggaagacaatgtagacaaatcatttccggccgctgtccatgcatattctaaaatcttgttgtgaagatcggcagaaagtgccgggtcaaattgggactccggcattagtgcagactagcagccagtagggcggacctgatagggcgatcaggaagctttcacggatgacacgggatagaacacttcggacactgaaatgagggagttttgcaaactttgctggataaatacgcccagcgagggtggcagttaactaaggggaccagaagaggcaaggatcgcgctagcacgctaggctatatcaggaggaagtagggtgttattgcagggtccaatgtgatatgtttagcttcacaaggtgctatcaaattggactgaaaatgttgaaatgggcgttaatgaaatggatgaatggggttgctagtgggattgagaagttcaaagacactgatagtaattaagagaagtatcagatcccgttgtcttgggtgaaatgagtccttatgctatctaaatacctgccaagatgacctggcagcatcaaattcaagtctgaatgtagatatataatggcgatacagatacgctctcacgctctcacatccagatatacagtgtcagttggacatgcaccccaaatgagcctcaatttgggcgggaatacgatgatcctggtgtcactcagtgcaccatttcacgtagtatcagaaccccacaaatttgtgcatccaccttgagccctacggccgatattcaccccggatttcgttgcccctctcaatcgagatattcgcgctctgtccagaggtcgcagtttcccaggttctcgaggtgacgatccgaactccatcgtaggctccccttccgtggccaccgtattgatatctccctctcttcgaatgacatcgagaagaacgccgtggccaagccaccgacgctgctttccatgacaccggcttctcgacgtggtcaaccatggcattgacgtgcgctggctctcccaggtgaccgagaaattcccacaagagcatcaccaatgaggagaaatggctggccatccatatctacaacctggaccaccagaagatccgcgcgagctaccacctacccatttcggcaattaggccgtcgagtcgttctcaacccgatctttgacgagacaaagacccgtgaatgcagagatagacgcccatgtatgaggtaaacgagaggccagacgaggctaaacacccgggcttccgcgactttgcgcaggagtactactaggatgtctcctgcgtggggacgccgtgccgctggacatgccggatgacttcttcacggaccacttcaagtgcgatgacatactttcgtccgtcgtcctgatccgctagccgtttctgacagacagtcccgcgaccgccatcaagaccgccgacgacagcaccaagttcagcttcaagtgaagacgtctccttcaccgtcttgtaagtccaaagtgcaggatctcaggttcgaacccttaatggtggctagacgtcaagccggatgataccgggtatcctgtcaaccggcagccacatggcccacatcaacaactagtactccccggcgccgatccaccatgtgacatggatcaacgccgagcgctagtcgctgccgctctttgtgaatctggactaggagaatgaattgtgccgtgagatcctgcgcatccggagattccgagggcaaggacaacgagcgaaccatctcctatggaattatctacaaagcacaggatggactatttggatcgaattaggctttactactccgtcatccataatatttagtccttcaagggaagcgattaccatctcggcaagacttgactaagtccttgaagcctagttctagctacctagttaacttatgatactgaactaacgaactactcacgtagttaaccagttaactaacagaagtaactaatagacaggagctgttacgaatagaaactgtcaaaccgtggaattcaatatttatggccggaaggggaaggaccatggatcgacagcttgtacataggattgtcttccccactattgatggcctgatccttatcctggggatattctgacaacatacgtcaagcctagccctacagggagttcaggactaccgagtcaaggactaaggtgcagggatttcactggaggagccgtcatttaacgctcactgatgtcaatacaaactgcgtcgaactcaagtatatcgtactttgttagtctcggaacatgtcactgctgatcccgaatatttactagggctaaaaaggtctggattgttgttggacgcagtgacttttttttttgtcacgccactcgccactggtgaactatcccaggacatcagaactgaacgattttaacggaatttgccggttctgtttattattttgtctccacagacgttattttctatgacatggaaaattcttcagccaactgccaaaatggggttcatgcttcatgccacccaacccggcgtgttccgcagccacaacagcgaggaaacaggttggctgatagagcatcagttgacctaatgcagagcttgactaaatgacgaaatgacgaaatgaagatcaatcgaaattgaattgcttatattgagcttcttctgcttcaaagtcttgttttttcttttctacattcatcagcaacaagccttactctccaatcagccaagtcaatctgccagcttcaccagctatggaatcattatctgctttcgtcaagcgcaatgacgcgcttaaaatcaatcctccttccgccgctatccatatcactagccgtggcagtgactggctatggactgtctttgcgataaactacttctctcttgtcgtcttccttggcctcttgttccggaccccgcgcagagaccgcatcttccactacatcagtatcctgaccgttactctctctggtatctgttactttaccatggcttccgatattggctctattgctgttgcccccgaatgggtacgaagcagtcatgaagtcgccggagccactcgacaggtgttttggatccggtacttggactggtatgttaatcctaccttgatctaggatccctgatggaggtgactaacgagctattaggtttactacgatgcctttgatcattttcaatgtgctgctgacagcgggtgtctactggcacaccatcctatacactgtcatgatgacgatcatctttgtcatcctgttcttcgtcggtgccatcgtccctgatacctatcgctggggttactacaccatcggcaccgtggcgcttttccttgccttggagaacatcgtctgggctggcatcacccacgccaatgccctgggtggtaatatcaaaaagttctacaccttcttgggcccttacgtctttatcctctggatcctgtaccctatttgctgggcctgttcagagggtggcaatgtcattgccccggactcggagcagatcttctacggtattctggatgtgttcagcaagcccatcttgtgttggattatcctctttgcccacacccgcattgatatcacccagctggatctccgtctctatgaccgtggagatgtggagaggaacactccaagattcaatgagaaggaggaagagagaggtgtggccgctgccaacaacgatcccgcccaaaatgtttagacccctgtccgataccccttgtctgataccaacagtcgagggattccctcgctgaagactcaaattgcgttgcagaagtgagaagtgcttcggcactccactattcccaggtatatgtgttattgcccttattgccctacgagatacgtcctatctgtatttatatgaacatatctaataatagtccaatttaacctcgattaatatatgcagacttctattcctattcactggctctgctataactagacaacaatccaatttctgaagctggccagatggccaggtacagtactccgtattccgagcgacgatatgataaatattgcgggggccatctcggggatcatcattgtgcctgtcattcagaaaggactctatccttaccttacaaagagatgagtctcatttggaccgattttacggatggcgatggcagtcagctccatctcctgactctctctatagtttacacttacctaccagggccatgctatgatacaccactcgcatgtcctgcttttaagttctgacgtactttggaacgttggcggaggtgttttgccttaccatgggaaccgattatgcttataaccacccgcctaaccttgtaaggctgtctaatttcgagctctcgcagtctactccgtaccccgtcaaggcttatccatgtacgtattaacctcgtatacaatttaaattttgagtttgattgcttaatttatttcgcttaatccctaaaaatagatatttgatgataatagttggacgatgcccactattatcggaggcagcttcgcttcagcctcggtctcagcctcattgggggcctaattcggtagtacatactccgtatacaacatgtgggcattcctctctcctctctcatttccattttcaaggcctaaaacgaaattgttactgaaaatggcagagccaaacctttctcccgcttgttttacagagtacaatgagcaaacccaaagcagcctattctcgctcctacctccagagattcgctatgagattttcgcttacgctttgacaagtgccccggacaccaggcaacgacctgagcgagatggatactgcaccagaccaggctatgagaccccccatcgaacctacacagaactgctccaaacctgcagaaaagtctacatggaggcatggtttatgcccttcatctgttcagagcatgcattctggatggcctcgtcggaacgtgttccggagcgaattatcacggttgagaagatgcagcaatgtctagatctaattcatgatcgacatggcgaagtgcagggcggccatattcgagtgtttcctcagctatggtgcctcgaggggaccaaagacttcaatggtatattcgccatgcgtcatttttatcccaagtctgtcaccatcactatccgatacaccgacacctggtactgggaatcaaatgatgagttgcacattgaaggagagtggggcagatggctggtgctgccctctagcgtcaccaggttctgcatcgatattgaaagcatcgagcgacgaaaagacgaagtagactatattgcgggcgaaatggccgatcgatggcgattccagcgcgccgatggcaccaacatggtcgcagccagggccgatacctccgtatccagatggacgggaagttccatgcttggcggagagcgctgggtgcgtgatgaggaggcgcctggtcagcttcggtattattttgcgactataacgtggcgaccttcgcaagagcccttggatgaccagggtttgaatcctcctctcgaagtcgattggatccgcccatcaattccggatttgggctgtaattatatcgaagaagcggatttggacaggctcggaatatccatgacagttcctgctgaacaagcggttgctgaatatatcgctgacagggatcgcaggcgtgatgtggtagagcaaaccgttcgccaggttttaccttttgtccagggatatgaagcgcttgcactgcgtacacctacagctagacctagaccgtctgactatgacctagatgaagaggttcaggttctaatttggcataattgggtttgaatatgtatttccttctcaatcgaaattcaagtgttcaagtgagaatcattccaacgaaaatgtaaaagttaccataacaaaataaaggaccacgtgacccacgcgttgccatcgaacccgattaggtctgttttgattctcattccccgacaacccagcgcgacccacaacccacaatctccatgattgtgcatttacgatttacaactctccctatacgccattaattgttagcttcatttcatccactttcgtcaacggcgcgttgtctaggtcatggcggcaagcgcgagggcgcagaagcctgtcggctcagcgccatggattgcagcagagaaggaaaacatggcggagcttgtagagcaagaactcgaagaagtggaataccctgtccgacacgaactggactggttaaatgaacatatgaccgagatattatccaaaggccaggcgtgagttgcgaccgcacactactatatgtgtctacttagctaacaatcacacaggaacttcgcggacgtgttcaagacgcccggaaagatgagaggtaagacgcctcgaaccgctcggaagcgtaacccggaagagtctcgagtggtgagtatttttcatcgaattggttcaacagctctcgtctaatgcctcttgtagcccttgagcgagatcttctcatccgcccagaaacaaatggaaaaccaagcaagcccgagcccattcatgcatcgtgttatttctaagcccgctccaatgacggcatcgcctgtgccccgcaccaatatcgtgacagagcaagcttcgcagcccgaataccccgatctcacccaaactctgaactccttccccacatacaacactgactcgggctatcatggcatgcccgatgatgatgagatggtactgcctgacgtgcaacaagaatcacaggcttctactcagccttgtacccagtcttttgaacaggacgcgcctatgaatatggatactcaagaggtcgagatctcggccagtcaacaaacgactgaagaaaccttccactctgcgcgggaagagatccgcttccgtggggagaccgtcgaaccaaacaaggacccaaccccaaccccagcaccagctccatcccaggagcgaacagcgcgtccagccgcatcggttcccaaggaatccgagactgaaataatgtcgactccgactaaaataagaaaatcgaaaccagatgtcaaaatcccggaaaagcaactggacgaggaacctgcaccaaaggacagtgatccggctatctcaaaacccgagccatccccggaaaaggccctggtggccccagtatccccagtagctccacctatcaagacgcaagagtctcatccagaggacgaggatatggaggatgccaccgaagatgctacggaagacgacacagttctcgacaatcttgatgatatcggctctccttcggacggttctactccagagcgaccattcgctcggaaaagcagcttgagctttgccactctccctgcgcgggaacctttgaagactcgaacaagccatattgacctggcgaaaatgagtactgccggacgtcccagttactttggcaaacagactggcggccataggattccgcaagctgcagcagatgataattccggtcccatggcgttggaaattgacaacgagaaagaaccaagtgacgaagcagatcctgaccaagctaccaggatgcacagcaaaaaatccacccagtccttacatgatagaatcagcatgctaggcaaactccagccatcccgaccccgaaagtcaatcccatccgcttctgggctaccaggtcagattccctacccagaccttcaagcttccaaggctgaagcaaagtctgaagcttcgaacgaaagggcacaggaggctccaacttcagagcctatgtcggtggacgatgactggatcaaacctctgagctctccccagaaacatgagctttccaggagcaagaccacagatgtcatggagaagcttgctgaattcgaaaaggcgcaagcagtcaataaaaaagatgcatcgcaaacagagcctgaacgtcccacaactacctcgatgttctcttcaccccgaccgcacagctaccagcaaagcgcttcttttcctcatatgccggttgatacatctactactccaacaggttcaccaagacgctttgacggtcatctcagtgcttcgaagctgaaactgcactcgattatgaaatctgccaaaggattgttctccagcactggcgccaccccacggatggaacattcatcgcctgagcaggcgcgcattcagccaggtgctggctcactcactaaacatgacaaacatttatctcaaccagtccctatcagcagtcctcaacgaccagaaggccggcgcacacgaagctcgaccgaaaaagaggagaaacgtcgccagcacagacgcgaagagcaggagcgtgaggatcaagaagaagaagcacgtgtcgagagagcccgggaacaagaaaagcaaagggccctccagctcaaatccgctcaggaaaattcctcggtcgagccggaagagagggcaggctcagcagtacacaagacctcccagtcacaacgccaacaatcgcgtgaacctgaattggtccaggagtctaactcgaaattttccatccctcagccaaagccaaatgaccgtcgtcctctcaaacccactcgcgagcccgtaaaacgcccaacgccgcaacccatgtcaattcgtgtcggcagcaccatgtctcgtcaacaaatccctgttccgtcgtcttccagtgctcaggagtcgagtgtgtccgtagccacctctgcccctgcatccaaaccaactctgaaaaagaagggtagcaatgcatcattacatacaacatcttctgcaagcagctttaagagctctatttccagtcaaacgcaagcccagcgcaaggctcaggttgccagcgaccgcaaaagggagcaagaccgcgaggcacgccggaaggaagaacagaagcgtgagatagaacgcaaacgtgctgcccagcaacaacaacaagatgaggcccgtcgccaggagatgagaagtcgtgctgaagctgaaagagagcgccaagctgaaagagaacgccaggctgaaagagagcgccaggctgaaagagagcgccaggccgaacgggagcgtcaggccgaacgggaacgccgtgaacggtcggctcaggaagatccaaataaagccgcccgtatggaggcgatcaagaaacgacaagcggagaatgctcggaagcatgggcggcaaggcagccagcaaatagtcaacgaggtaagcgccttgttccaattcgggttttcataccgctaacagtctccagggaccaattctgcagcacgagcagccttattctcagtcttctcaacggagtgacttgggttcttcccgtcctgcttctcgcctgggtagctcaattcaggcatttggcggccgcagcatcaacccacctccgcctaaccccgcgaaacccccaaagagaggcaacgatgaaaacagcctgcggcctgcgccgtctaaacccagcagcgtgcaatcaactggcgagtttaaacggcgaaagacagaggatgagcacaaccctattccacctgtgcgcacaatggcacaacctatccgtcaatcgaatatcagaaaggttagtaacatcggatcctatgcaatcttctttcgggcaaattattgacttcaggaatctatgcagccttctacccttggccgtggacagtcttccatggcaccacagtcgggctcttccagctacagaaatgctcaacctcagcgtcccgctcatcctatagtcacgtacacgaacggcaaaataccgtttgccgaaccaaatcatgcgcctccgccaagcgcacacaagattgcgcccaactccgtccaacgcccaccagccaaaccatctccaaagtacccaagtggtgaaagtattcacttgccggagatcaacactgatagcgaagatgatgacgattccgactccgagatgttccctgttcccaagtgggcacagtcaaaggagctggagggtcttctccgggagcaagatggtatggaagttgactcgatcttcgggccgattgcaccattctctctagaagacaccttcaaggcggataagaaggtcaagaaataccgtgaccgcaccagtagtgcgaactggtccggacccgatggacttactcaggaggagattcggagagatgttgctgaacgacagcggttgcggctcaatggtggttggagattcaacagccagtgaccagccaggtgatctttctttcttgaattgtacattggtctatacaataacggctgtggccttttttggggtatgaatttggtggtggacatggttatgccggtgttatgggtgtatcatctacatgatggcgttatcttgtattattcttgtggtcacttctgtttatggttttagacaacagctgcatagttgcatccatcggagcatggagttaatgaattgttattttggccttggatgttctcagtgttctcatgcattatgttggaattcatatggttgtcaatattaggggtgggaatgagtttagacttattatgcactacagggccgttctttacatgaactagcatcattggtctagtggtagaattcgtcgttgccatcgacgaggcccgtgttcgattcacggatgatgcacttcttttttcaattttgatattagttctacttatttgagctccgtctttctaaatatcatttaaatcttacttcttttttgcctttttctcatggcacgttatcttggtagtttaaatatagtatggttggtttccttcggcgtaccatcttgttgaagacatatatatagaaccactccattgttttacccaatctattatctaacaggtatccgcgacatcagataaatgaaaaccaaagaaaggcgctattacatcagggaatcctagtaaagcttgatcatttgacggtctaaccgacatagtcttgtacactctacactaacaccgaggaagcaaaaggcaaaggaacaaaacaaatatggcacatgtgcatcgtttatggtttgtacttggccgcatatttggccgcccattcccggaacatacaccatgagatggaaatgagaaacaagaagatgaaaggcaaaaaaagaaccccggtccaaacccatgcccctggcagcgccgagaatgatataatacaagatgctctagcctctacgcagtaaagacgccgatccatcacttactgcatatccggctcgatatcactagcccctccatcggcaacctcatccatggcatcggggttgagattggcagcgtcgggtgccacaccgatctgagtctcgtaggagatggtgcgccagccagatgcactggtggggtctttgacatattcggacatggggaactgttggatgttagaacggttcgatattataaatttgtgtatgatgcatggtaagactcacgtaatgatcattcttcttcatggtaacaacccagggaacgttgtcgaaggtcacggcgcgaatacggaagtactcgttatcaggaatcttgcggacctcccgaataaagctgtctaggtctggagtcgagacgctgttgacagcagtgaggaagttagtgggcgcaaggccgtagtggtaagcgggggaaccacggctctggagaatagtgttagcggggtttgaagagatgtaagtgaggtgtcgaaactaactctcgcgctcacgtagatctcgctgtgaaccttggagatctgctggcgaacagcatggtgaggcttctgtagaacagcaccgcagaaggcaagggcacgatccgtctcaatatcctgagtcggcaccgtggggacgcggatgcgcacttcctcgccattccgtatgaccaatgcatcaaggaattccttctcatacatgacatccagctctgaaacgcgagtgatgatcttgccatccagcgtgagaataatgtcggcttcctggaagctggtgctagggtcgggagtgacgcctgccggaggactgtcaaccttgcgcaccatgaacagctggtgtcgcgatgggttggtctcggtgaccttgttaatccactcctgcgagacgcccatgatgcgagcctggctcatctgcacaacatagctttccatgtttaagattcgcaacgttgggatttcgccttgctggatcttggaaataacggggagcaggtatggagtggcaaggccgaggtggtattcgacatccttgtgagagcttgccgagcgctcaccgaggtagttcagccacaaggcctgcaccacaccgtcttcgccgacaagcacaccgtttgaacattgtgaactgagcccagtgtccacggtcacggcgtcgaggttgattgcacggtaacggggggcagctgcgttggcggggattgacacggttgtaatatcagtgacagtagtcttggccacaacaatgcggtagttctggttgaagccgacaaatatggtatcctggccttgtttgatatagtcggtgctgagctgggcgctcttgaccggagccttgacaaggctggggtcgtattggatgatggagtagttctgaagcggatgtaggaagataaccttagcaccgacaatgattgagtcggccacggtaatgttgatgtcgcaaaggtcgtaggggacaatggctcgtgatactaccactagacccttctcagcatcgatgaccagtccaaacccggtcttcttagcttgcgggtatccatctagcttcaagggcatgatgcacgatacacgcacgaagctacggacaatctcggcagcggcaggctggctgataccgtctaactggatgaaattggcctctcttgggacaggaggttcggcaggaatgggatcggcgatatcggagaaatcccagacaccagactcgtcattacggaccgccaaccgcatcttggggtgccagtgacggtcaacgtagatgatgctagttccttttgtgtggaggtcgcgaatatggcggtaggagatcaccacacgagtgcgatcaggaatgttcttcatgacctctatgaattctttgagattacggatgggccgcttgtcgattgaatcaatgatccaccctgccacggtattctccaacttgaaagaacccgccgactcgcagacatagactccgcgagtagcaatggcataaagacgtgactgctggtacgacaaatcatggaagctggcgcccgcgactgtcacgaaacgatcgggggtgatatcatgaagatttcccacttgacactcgacctcaacgtcttgaccgcctctctgaaccagcagcttgacagattcgccgacactcgagtctaggatatcgtcgagacgaacaaacttcgtaagaagctccccattcaccttaatcagcacgtctccctccagcaacttaccatctgcgggcccctctggaagaatgatctccgccgcaagcatgttcgtttcagtaggtgctgcggcacggatagcagcctcccactccgggctcagaccaagacggcgacactcgtcgaaaggcctcaagacccactgtgtttgaatcgtaccacgagtgataggctgcccttggcggatacactcgagtgcacggagcgggcggtccagcggcaagaagtaatctgtcgcagctccgtcggctcggccaccagcctgcaaagcaactgcatggccagcaagattgaccacaggacttcctgaactaccgccactggctgcagctgcggcctggatgtagtttgtattgaaatcacagtagccctctccatattcaggcgcatttcggtccaatcgactgatcacgccggacagaatgctcagcttttctccagcatcgttacccacaacgcggatttccgtgccaacgcgcgcgccatccggctggagcttgagctcagtgactgccatatatcggattttcttcgggtcgaactttaaaataccgaaatcatgaacagggtcgcggtataccggtttgacatcgcactgcgatttgacaatcttgttagtaaccagacaagagttttgaccaaactatggcgcagcatcgacttacttcttcatggttgtcaaatatgcagtatccccagaaaggaccagaaccgacaacgtgacgattggtcaatatgtagccacgctctgcatccacgacgaaaccagttgcttgactggacattgagagctctgtatcaaacgaacaggtttgacaaaagtgaatggagacagcgcatttcacaaccttctcaatggtagcttgccattcaggtgaatctgctgcagcgggtatggcaactggtgagggagctccatctgaatccccctcaatctcatatacggttccgttcgcaggcgttgaatcgtcgggagttaagactgcaggctcaggtctgagttgcttgttcggatgctcggaattatcggccgctgtgctgcgctttcgctttgcactgatatcgcccatgccatccatagcgaagagatctgaggtccggaagtggtatggacggggttttaggcggttgacgagggtcgagattgcgcgggagcctcttgaggctaacggagtagtagataatggggtatcggacgaacgaaacacgtgaaggtgtagacgatgcggagttaaggaatgtgacgcaaatgaccgattagcggcggctggagacctcaaaggaatggaggttcggtttgaagcttgacaagatgacaaaggagggatggcagtgattcgcaagctccttctgcatagagctgaccaagagcaatacatccactagagaattgggggaaatgtgtacgcgccttgacatcgaggcaaaacatgccctccaacaaggtcccaaaggcggagaaggaatagggccatattattggccgagggcgttagttatatcttaggattattgccggcaacactagtacgattaccatcgtcttcatatattctgacaggttagagtcatacaagactagagcccgttggttctgctatctagcactagaagacgtcttaccttgaaaaggaggttgatatcaggcttcagaaggagagaacaggcggtattgccgataaggacgtgcatgtctatgcgcccaactgtcaaataagtttgaatctgtttaattttgagagataggcgcatggaatgatacgttattttcaactaatgtacaaattcggaggatgctttgtagcctgatctactcaaacatgagagttcttcctcggcaaatgctcccatacttccaaagcgggggacttggagtatctcccagtcagatacagatagaatacgactgctttgaagttcaactggtcacacacgattttcagccggcagagatggtgcgcatggtggaaggcccatgcttctgtgggtataatggtgttgaagggaatgggccggcgcctctcatagagcttgcattgatggcccaaaccatgatctgagccgcagcggtagacaaatcaggagctcgacatgatatgtggcatgccttctcacgcggaggattgcatatttcctcattaattagttcctcaaataattgattcagtcatagcgccagggctaggtccaccgtttccctgcatggacggaggacttggcctttgtggggtagaagcctttgcagagcgcgagaagagctcgttgagtctgacatatagctcattcacagcggggaggttgggaggcggtgtcatgatcgctggcatttggggcacgacgccactcggtttcttcgatcgatcggcgatagtcgcgaggtaggctaggttggcttgtaggcgtcgcatgcactccatatattcggggctcttctgattggctttggatgtatctggttgctcggacgccggtgaatttgtatccgggttggagacggcgccagccttgccggcagcttgaaggttcactacctcttgcaacaaggccgagttgatgtcaagcagagccgtgacacgggccttctcacgtgccgcaaactgagcctgggcctgggcctgggcctgggccgggttcggaaccgcaggagaggcaacggtctggggcgagttgatttgtgaagggagtttgggctgtgtgccgaggaggttgtttgctgatatggaagccatgttttgggagaaggtctgcgctacttgagatggcatgttggcgccagatgtgccttgaggggggacgaactgtcccatggaggtaggtatgggggtctgggtgtagggcgctgagaagttatccatgggtgctgctattatgattaagcatggtcagtccagatattccaaaataaagcgacctggttagttggcaacagtagacaggagacaaatggtcaaagccagacaatgccaagggccaatgcattgagagcggtagggccagtttcacccaagccgtagggggtttagggtgggtgacacaagcatgagggagcttgagtggaaataattcaatccgatcttgagcctcataggacccttcctttcgaagaatttgggcaacaattctagcccggggtaaagtgacagacgcacggtgccaatgataataacaaaaaaaggggggagggtaacgaaccggaagattgttgggggaaacctgaaggcatcatagctccaccaggaccaggctgcatgggcataccaaactgttgacccgatggtgtctttgattgggggtattgaggaacagcattagggtagaaagacatctgttggttttgggggctttgagtcgggacgggatagcccgcgggataaccagtattggggtccattgtgtattgagggaccatcacggttgagggagggctcaagggattattttcgccctgtaatatttcttctccagcgatcccctcgatttagggaggctactgtggctgaattacgcaggccgcacggacgagacggtgaaggtccaacggcgcctgttgaccaggaatccagggataggcagataggcgagatcccgaagctgctagaaacaaaaaaggagagcgatgattggctcaatcagaagacgggttgtattgggaacagggcgtctccagcgaactgggattcgtagcaagacagattctggtgcccagattcagagcgatcagccgtgggcgggctaatgcagcggagcctttttggaatggtggagacacaaggctcgaatgaatgacgttgggatgataatgcaatatgtcaagttgagtttgaacttgactttgtgatccagagtttaagagtgtacttgatgtttagagaggctggtgtccacagtgaaagtgacattcgacggtcacggggtacgatttatgcctcaggcaatgaatgttgatgcctggaatatgagcaatggtcggctaacgatctctctatttttgaccattggaactaaatagccctaataataatatcagacatgccattttcctttctatgatgtagctagatgtgaaataatggaaaataatgcaggaaaaccgtagaatattgggaaatatggtcaaaaagctatgcgcaatataaaacgatttcaagtacggagtagtccgtacgacatgtgacaatcgatagacgcctataccattttcctactcatagcaactagccgaggtcattaccccatgcaggcatcacatctcttaccgctatattaacacaggaagagcgctttggtcccgtcgttgggctcaggtgctggggagaacgccacgcacagaagaccaaagcccctcggcaaggatgccgaagggagcacggaaacttcttcccaagcaagatcgcactttgttgtacatatttactccgtaggtaaccatgtattttccaatcgcttggcacttatgtattgcttggcgatcagtacccacaaaccagactcggggagatgggcacacgcttcctatgtatgtagatgagatagggaattggagatccttcctaactcgacgtgtcaggaacagtcaagcgacacatcagtatctcggatgaaagggtaaattgctaaacgaccctatttatagtcaatcggtgcaggtgctagcgatccccactagactagacaacatgctcgtaaaggcatgcagcgtgttggatcagcaggggataagaaagcattgttaaatctgagtagtatgatcgaagcccctacaatctcgggaatattggcacaaggcaaccgcttggcgcaaggtttttggattacgattctagagtactttgtccacttactccgtagctacggtatgatggcttgcaggtgtctggcagttccaaggggcatgtttcaacggattgagttgtgaggcttgaaacctagccagtctacctcatagcggcacgaacagattcatatgggcataaacaacatagtacatacctagcttacctctcaagttcaaacacctgcgcagtcgtaagtcggaattcaaatctccggctctatcatccctatagcattataataggccaatgataggaaaacaaatccgcattccaaatcaagacctaatgcgccaaaatactccgtcgttggtttcgatactgtatctgcatggccgctctgcagatcagtccatttcgactccgtcgtctccaccggcctgggttatttgaagttgggcctccacctttgcactctatttacgcacggagtagatacggagtaggcagtgcgccacacctggacagacccagtgtggcttttttatgaacccttatgtgtaggcacatcgtttcgttagtcacagatcggcagtcgcaagctgaccagaggcattattattgctagtgtgtggccgtcgcagcagggtcttcccatccccaagtccccgtagaaaaatccacccttcttcgattccccttgtggcccactccggtatagaactggaggcaaaactggacaagcttgccaaccgtacaatccggggccagccgttgggtccatctatagggtatttcatcctgtttccgtggccaatgaccttgacagagctgaccctagccagggcgcggaaaacatgtccaggcgatcgccagaggaaccagagtatgcccattatgctatgatctacatagatagcgatggcaatctgtgccaaagggcctccgattccatttcagagagccgccagactatcctctcccctagggtcaccagtgaattcctccgagcggtggcgatgtcgagagaagcccaggcaacccgatgtcaaggcaagtgctcttttgaccccacatgaatgtcctattgacgtagaacagtttctcccgaggtcccggtgcggtctagcgggcccccgtttaacaaccacagctctgccccgtcgcagggggagcccgtggcttatagtggaatgtgcctgagtagccaacagcggatacaagttcctgtgcaatcagagtctacatttcacccgaccatgtggccaaccgaatcctggcctgtacaagcctcacagcccaagaagaactttgcaggtcggaacctcaccttggctgcacaccagaaagccttaatctctgtaaaagagagaggtctgttgcgtctctactatgagaaaatcttccaaaacctgcaacaaacaaactgtcgaataatagccaaggcctacatcaaattagtcgagccgcgcaagcaggtgaactatccatacaatggacggaagattgtcgaaggcagaactcaacagcttgatccagaggcaactaagccaccatggtggccgcgtggagtgagccatagggagccggatcatcttccaaaagttggtaagacacaaatatcattccggatgtcctaccaagctgataggagtcagaacgcattcgacttttggtatacatgctctgcgagatgcgcgaatcgcatggaatcacaaccgccagattaaaacaatgcgatcagcccatccgtcgtcagatcctgccggtcgagcggctacaaatcctggatgaggcatatcgagttcgcgaggaagaggaaaaattcctggatggaatttcaggtacatactccctcgcattactcctcaatccccttctcacatgtatctagagggaaaacaagtgtgcatagctcgcaccaatcttcctcatatggcagaggacacatccagcgaacaaagctcgccaaccgaacccgtctcttcccagaatatcgagtccgagtgcagcgacggcatcttcggaatcgatataaccaaagtcaccaccggagacctgccgagcgcgtcagcgtacaatccccccaatccttatagcccgatgcacctgggcgccagcagccaataccattccgtcagcccctccaacatgtcaacatcaccattggaattgaggccaaagcacgaatcactgtctgccgggactcatttgattgatcggacgcgctccatcagcatggcccactacccatatcccggcgtttctggcattcaatcggccccgatggacttttacggtacccctaatatgccccaggatgcaggtgttccaatcactcagacatcgacggaaaacttgtcaacagagtcaatgatgccatacggccacccttattatttcaactattgagcgtctaagcatggaccggagcatggaggatatctttttacgataatgaatttcgttcgggttgtattggaacaagacagctctgtccgaataattatttacgagtaagcccgaggcgatgcctctaaagatcaccagttgaacctgtaaccgatgagccgagttaaaatccagggatagatacaaaaagatgggtagaggccggcctttttcccattcgattgccctgatatgcctataggcactgcgagtaccagtcattggagtatttacaggttccacttgtgcaagttgtgcttccagtccagcccaacccaccacactgaccatagagagggacaccagtagtgctaccagagctggtagtcgtggtggtagcagaggtagtcgtggtggtagcagaggtagtcgtggtggtagcagaggtagtcgtgctggtaacggtagccgtagaggaagtggaagtaccagaagctgtaccacccaaagcagccaagataccatcataagccggcttcttcaccagattcgcatcccaaggacacgcagcaccctgaccagagaatgtactaggaacccacgagtacttgtccgtgtagtcccaaatagtaacgcccacacacttagcatttgccacacaagccgcaacggtgttctggtaatcggtcgactgctgcgcaagcagggccgaagtcgacgggagagtcatccggatatcaagctcagtataggcaacttcgacgcccagggccgtgaacgcggccagattggtagtctgcgcgctctggctaggggtacttccgacgataaaatgtgcttgtagaccgacaccgtcaatcttggcgccgtactgctgtaccagcttgacgattctctgggcacctgttgccttggacccggcggattcgatgttgtagtcgttgtagtagagcttggcgtctgggtctgcggcggctgctgtagcgaatgcgatgggaaggtatgcctcgccgatgtattggtagaagacgttgtcacggtaggtgccgtcctcgttgagagctagtagtccataaattaagcgacttgtgatgatatgattcgttcctagttcggcactgaccttcgttggcaacatcccaagcatagcatttgcctttgtagtgagtcaccacgttggtgatgtggttcttcatggcggcaagcagagtcgcgttcgtccaggagccgcttgagactggttatcattagatggatattcccgcattgaaagacacgagataacagaacttaccccagctgggcaactggctataccaaactagagtatggcatcgcagcttttggccattcgtagcagcgaggttggcaatgacatctcctttggtataggaaaaggtgttctgagacggttcggttgcatcccactagcgacgattagcgatgtttgaatattacgctaagaccagcccaaccttctgcgcattaccgggtgtaatctgtccaaagtcgtctgtgttgctcagctgggcaaggtatgcggtatccgtcaactcggagttatcagtagctgatccgaagtatagctttccctttgcgacagcagcggtgttcaatccggatgcattggtcctattgagaatgggcattagtcactatcaactgccaccgtgctgggaattggaagatcaaccatacagctgaggaagaacactggccagtgccagggcaatagtggagaagtgaaccatgacgaggtaatcaacgccaataatgaattgaccgcaagttctggacctggagagagaaatcgaagggtcgagctccttttattaccagagataaacagcgtcaaattggccgggtcttggaggttttcaggacctccggcgctaggtttcacattagaccaccttgtcaactcgaacgggccgaaaggccgtggcatagttgccgcggccgtttcaaacagtcaaatgggcttggccattgctgagatgctggatgagcatgagttatgcacggaattcgttactttagcccgggaaactgacacgggacccgacgccacatagtgggcaggggagagaaacgaatagggagacggcggagcaaattccgtatttccttcacggcaaaaaggggcttttttccatattcttggagggaagaggagaccgggtaaatgcgattttctacaaatccgggggatcttcaaggctgtcgatcaattcttcttctcttctccgggtaaatcttgactactaacctaaaagtgcgaatagtcagatcagaatcagcttgataattcaggctgagcaggtttccccattgcgcattcaggtcagacacgattcaaacaatggctacgatcgacctgttggattgcaaccttggaaagaccttttgcttagaaagggggcgttgccgcctcaatgatatctataagatctgaaaatgcatatatacacacaagactggcgcttttgaggggtatcagagattttataacgtcatgttgctccgtggtcggaccagagctgagcgttgcgagtggtgaggcactgttccagccaaacccagaccaacaggtcgataggcaggaagcagcgctcccatgggtgtgatgactttatggacgcagattccatagaaatcaacggatcggttgaaagttgagtggtaggtttcatattagtgagatactactcagccagtcttccgagccttcatctctgcaatgtatttcccggtcttggagataggcacgacgtggatggtgacaagctcatccacaacctcgaccttgccaccagagagaatctgcaataaaggcagcttcttgccagccttgatcaaaccaccggagacagtctgcatgaagcattcaacaccttcgacggtgtactccttcttcttgtcccaaggaagggggaagatgtaactcaggtggtcctcgatagcgttcatctcagaaaatgccttgacaaagtctgactgggcgtccatggggtaaaggaaaacgaccgggaactcgattgtgctctcgggtgaaaggggatcagggacgaggcggatcccggcatcttctatatcaggaggttgagcggttttgcgagttctgatctgacgggcgcgcagagctgcgctgagaaccatattctgcttgcgcaccctttcttcttcggccttcttcctcgcggcagcacgctccaatagggccttgcgctcggcaatctttttggcagattctagaagagctttactttctgggtcaattgccaatcctcgggctgcagaatcttccgcctcggccactttgtccaacttgaggagtgccaaggaggagcgatagaaggccttcacgtttttggggtttaacttgagggtggaagcgcaatcgagggtacaggaacggtagtttcctgcaaatgatattagtcaatgtgccatgcaaccaagaggataagacatgcctaattccaagttgcacaatgcccggttgatatacgacgcctcttccaacttgcgcaacagcgccgcctcttcctcgggatcttcgggcgcttcccacttatcctccttggcattaatgacagcaagagcctttgtgtagaactctttggcgtcaatccacttgagtccctgcacagcttcatttccttgtcctttgaagctattcgcaacctcccccctggtaccttcgttttgtagagcctgaagagcatccaagagcacgttttcaccctctatgaacccatatatgttagccgaatcgaacaaccatgttcaaggaatggttggacgtactctcgtcacccgctttgtcaatatcggtcatgaacagaggcgtcttattcatcattgccatcaactcctctgacgaatgcgactgaatggctgcaatagccggcggaagttctggtgcattgggatcggtattgcgcgccttcagtgcttcctcgttgatcgggaagggagtttcgtttgcagcgaaggcgtcaaacccgggcacgggtacgccctgggtaacctcaggaggcgccttgttgaggttgagcgactcatcaaagtcatctggaagttcttcgacgcgcgacatcttgagcgttggtcacaagaaaatgttgcgcttaatttggtgatcgtccaatgcttagaaactatgcccgcgatgcaaacagtgcaaacaggaggggtttgatcagccctaagccctattaccggattagtcggactggaatgggatgcaagaatatcaaacttgcgaagaagaagaaaacaaaaagatgataggaagattttgggtttacaatcaggatattccgtgatgcactgggtgtttctaggtcgatgaccgcacgtggagagggcctgaggccgccattcttcatactctatcaatctatcaatttgctgctgttgggttatatttcatgatctatatacttgattcactattggctggttctatcggagttttctcatagcggggaacaaggcatataccacaccgtttgatgcatgaggaactagtatactaggcaatgactacaacccaggcagtgtcggacacctactatacaggcctgatcgtgtgtactaatccccgcaactgacagcctgcagaaagttaaagcaaccctccttattccggcgacaaacctccgcacctcggaggccatgtcatcggtgaaaccccgaccagaacaaaccccgcatcaatcgggttgaagaccgaaccgattcaggccgtataagtccaggtgctaggttacgagaataatctgatctaccccagatattttcatgtaataacatacaccacatcaccatggccaaaaacttcaacatcctcatcctacccggcgatggcatcggccctgagatcatggccgaagccgtgaaggtcctcaagttctttgagactccccagcgcaagttcgaactgcgccaggagttgattggaggttgcagcattgacgctcatggcaagtctgtgaccgaagaagtcaagcaggcagctctggactcagatgcagtgctcttcgccgcagttgggggcccgaaatgggacaatcaacgtcgtggtcttgatgggcccgaaggaggactactccaagtccgaaaggctatggatatatatgcaaacttacgcccgtgctcttccacctcgccaagtgcctctatcgccaaggagttcagcccgttcaagcaggaggttattgaaggtgttgattttgttgttgtgcgggagaactgcggaggtgcctattttggccgcaaggtcgaagaagaaacatacggtgggttgcactgagattatattgtcattgaatagctaacttttcttctaccacagcaatggatgaatggggttactccgaagccgagatccagcgaatcactcgtctatccgccgaagtagcactgcgacacaatcccccttggcctgtgatctcactagacaaggcgaatgtactagcttcttcgcgactctggcgccgggtagtggaaaagactatggcggccgaatacccgcaagtgaaattggtgcaccagcttgccgactccgcgtcattgattctggcaacgaacccgcgatccctgaatggcgttatcctggccgacaacaccttcggcgacatgatctctgatcaagctgggtcgattgtgggtacgctgggtgtattgccaagtgccagtctcaacggtctgcctggtgataagacactgaagacacgaccttacgggctgtacgagcctacacatggatctgctccgacgtaagtgctagaaatatgataagaaagctgttctgactttgttatagtattgcgggacaaaacattgccaacccggttgcaatgatcctctgcgtcgcgcttatgttccgatactctttgagcatggaagatgaggctcgacgtgtggaggatgcggtgcgtaaagtgttggattcagggattcggacgcctgaccttgggggcaaggctgggactaacgaagtgggcgatgcgattgtgtctgcactatagtataagatatgggaatgactatccatgattgtttggtcaaacaaagtctaagcatgtgtcaaactggctgatcaatgaatgcaaatcacctctaactttgataaagatagaagctgaccaaaggcaatgtttgttagatactggcgttgaaaggaaattagatagtactttccatgattccataatgcttaggtataataattagattggtatgttcctagatatttctcattcttcttctcttcttattcctctccatgtctaataccatcacttccacacccccacagagtccgctccaaggcgagtctcccacaagaaacggagtactcaacatgtcacccccaacgcctaccactccattgacaccaccgatggcaccccaccatccaagccagcatcaaaacacaccaggatcctgtgctctacgcctcgaaaacctggcacaacaaacctccaccgcaaaaagcgagctgatgacatccgtcgcggcagacatctgcgcaacattcataagcatcgcaaagtattccgaggaaggcacacttcaagcgcgacacaccgacgtgatcgacaaggtgattcagacgattcgcgataccgacgtgaagcagcgacgcttgctggatcgacaggtgcaacgactgcgcaaggagaggaagtggatccggaagaagtattcgcggctggctgtgcaggcggatgggctgggtcgcgcctaccagatgaagatgcggaaattgagaatctcactacaagaggcgcagggggaggtggtgcgtctacgaattgagcgggatatgttgcgagattgctttaagaagtacgatattgaggacagttattcgaatgacaatgacaatgtcgacggggagtgtgaggttgacacgggggaggatgttgatggagaatatgagagtgcagaagagactgtcaagggggcagacctttgatacctctcagatgtcttccaaggcgtctctgggatgtctctcggagattatttgtccgtttgagcttgcatgcgaaaccgttttcatatttcctttgtctggccctgggttttaggggagaagagatctgcctcctatttcgaaaaatgacgccacggcgaagacaatcatgttcattctgagacttggcttcgtcaattttcccacatgacagcagtacaaaatcaagaagcaagttctatcaaaaaagactctcatttcaactgcgtttgaaaataccacagtaatggatgtaagcatcggatttgcctatcaatattagtgtcatatctcaatatcggcttctgagttccgagggttggatccgcatttgatgacatctggaatgtgattctatatcctccagggcttgttccagttgaatataagacgacaatcactggaaatgggaatctcgaccatcagaaccgagagaaccagacgtcggaacttgcaaatcgaaatcacagccgatcatgagcaagtcaacggtcgtccaaatcctacctcggcatcttcaataggcgcaccctgattcggcccgcggatccaccgacttccatgtggaaagtccggggggctctttttttctgttcgtttctccttcttttcggttctttttctcttttctctccctgatcaaaatcctcttacttaaaactcttcgaatcacctcgaagacgacgttgagtttgtccaatttcttcccgataaacataccccggaccgcgttatcggccgatacccagaatgagcacccacgactatgacgccgtccgcaaggacatcgccgatatcctgcagaagcccggctatgatgatggcagcgcaggacccgtcttcgtgcggctagcatggtaagtaaatgtgatcaagcctcatcgtttcccggtcggggacctcggctcatcggggacgataagcctcgcaatcttactgacaatgatttcaaacaggcactcatctggcacgtacgatgttgaatccgacaccggtggctcaaacggagccggcatgcggtacgaagcagagggtggcgatcccgccaacgctggtctgcagcacggacgggcattcctagagccgattaaagagaagcacccctggatcacatactcggatctctggacgttggccggagtagtggcgatcaaggagctgggcggaccggatatcccctggcaaggtggacgaacagatttgataaacgacaccaagctgcctccacgaggacgtctgccagatggagcccaaggtgccgaccacctgcggttcatcttctaccgcatgggattcaacgaccaggagattgtagcgctgacgggcggacacaacctgggccgatgccacggcgaccgcagtggattcgagggcccgtgggttacgaacccaaccagattctcaaactctttcttcaaattgctgctccagcttgactggcaacctcgcaaggtggcgtcgggtaatacccagtttgtgtacgtggaccccgatgcggatgaggacgaggagccgttgatgatgctgcccactgatatggcgctcatgacggatcctgaatttgccccgtgggttaagcggtacgccaaggataaggagttgttctttgatcacttctccaaggtgtttgccaagttgattgaactgggcatccggcgtgatgctcagggtgccgtgaccaacactgacggcactctcggtggatatgtgtcagcgccgaagaagagcaacactgccacaggcccgcccagggcacgtctgtagggttttattttttggctttgtttttggcttgtttttgatcaattccccactgcgttggttgatccgggactgcagactgcaggattcggatgtgtaaatagatcctagatcatagaatgtgatgaagataactgatggatgcctgttgatatgtatcgtcgtagtatcttcgtagtggaattataaggatgaaatagaaagaagagagaaaggggaatgttgaagtctggggtaagattgcggggaagcccacacggctatatctgaataatactacatatacagactggtatgggcatatacgatgtagacttattattatgtagtaaagaagtacttatgactgtaaaaaggcactagaaaggtaccaagcgtgtaatatctcgtgttatacaaagtcgggcctcgggtatatcaaatgagagcccgctgattggcagatgccgtgttgactagtatcaacggtgtatattaggaaatataaaagaacaaaagagtacaataagtcacataaatcacataaatcacataaatcaaggcaaatctgcatcatctgcatcactgtcaccaggcttccatgttggatcggtgttcttcttcctcgaattcctcaatcctggtcttcttgataccttcggcctctcctctcgctgtttcttctgttcttccttttctctttgctgtttatactgttcctctttagtccacctcgagcctttctcccgtaattcaccttcattttgttgttttttctttggatcgagctctttctgctcttgctttttccgtccctctcttctttttcgatcgtggccctgtttcttttgcatattctctcgatcgagttcctcctcttcttcctcgtcttctacgtcactaaatctctggcttgagttgaattcacctgcacgtaggacctgcttctcccttggactcagggcctgcttcgaaatagcgtagtttgtcatcgccgacctcttgagctcattaccgtgagtaatgcggaaatgtcgatttcgaagctcaggaatagtctccgcatctggcatgctaatatctgacgacccagtgcccctgcgattgcccagctggggtgacataggcagatcagggaagtccaaagctccttcctcactaggtagacccgaaggccacatgtcaggatgttgaagccagcgtggactctgcatcatcgactggaatatatggttcttgggatccacattcattatgccttgaccattgctcgataggtcatgaaggcctgtcatgtccataaacgaggacaactcgaactccggagctgtggtggtggaataaaggtccggatcaaggagtgattggtcgatgaccaatggatcaagaagcgccgaatcaatgtgaccaagtggcagagcggatatggcagtctctccggcggctgggttgggggatacttttgctgttgcccagccgggattgaaattgctgaagcgctcaccattgtatgatagtatacgaggccatgactcccgctgcggtggaggatccgatcgctcccaagggatgtgttcttcgaaaacgctcttgttctcgctcacgcaattggccatctctatcaacgtgttgttggccttgtgcaaaagttcgatggtgggattcatgattcgctcgtagaaaaggagcggaatggcataatgattgacccattcagtgggcactttttcgtcaggctgaaatgctgggattccaccgatgagaaccccagagttgacttggctgtcgtacatcataatattcccattatctttctcgcctcgtttcgtatctgtccagaataaacgagcatgggattcgttgttatagattccaccaatccaacgatagtgtgcaacctgtggcttgtcttcatagtctatgtaattgaatttgagattctctgtgtgatttcggattcgagtcttgatatcagaggttaccacaagacgcagagggagttgaccgatctttcgttctccagtaactcccgtcggatcaccacacttatcacacttgaaagatttgcgtgggtagaaacatcgctcgatcaactcttgcaactctactcctttttcatcgcccgtttggtagccaggtagaatgcaggacccttggtgggagttgtagaatggcattgcacactggcatttgcaaggggtcactcgttccacgtggaaatagcggaattgagcaaagcttctcgtggccactgaccataccgcccaaggaggaatcggttgtcccattttcaagccggttgagctgtcggaaaacatacggagccactcgtcacgcacaaatatagaagttttatcgtcgaaggtctcccaactcgccattgtcacttcgatgaatgctttttcgatatctttgaactcagctgctcgattgtttgcacgatctatcttggtacagccagcatcgagtagcattcccgctacaataacagcatctgttgcacaagacattgaatcccagatagggccgcggccccggaccggatatatagtgccattcggatcccaatcaaaggtcaatggggacaacttgacacttgccgtggtggggaatgacccaagtttcatcgtgagcatatccttgtaagaataggctgtcccgtggcgaataggtttcccagtagacggaatgctgggatcacggtccaaatctgcatacacgatctgcatcacagttcgttccatggcgtctgtaatcgcttgcgtgtcaagcgggatggaagctttcgggacaatggggctcagttggtgccttccaattggggtcactttatcggaaggtgccagagcaggcgtccaggtgaaagttgtgatttcatcagcagcaaagacaggctcttggtatgccgaagtggggtaatgaaagtgatctctgtaagcaggagcaccgggtgaaatttgtcttgcgcgcttgctacggggttcctcgttgtcctctgcactccgtttttggcctggtgcagggcccggtatcttctgactcggcgcttcggtcaatgaataggccggtgtaatctcgactcctgggttcatgtgttgcaacaagctcatgcgaaggatctcctcctgttgcacagcgagtgttgacgctggagatggtggaggtggtgtgtgtaagctgtcgacggagtacataaactgttgaataagatagtcgggcatatctggtggcgcatcctgagggcgtatgtatgcattcaagataactgtgttcacatccgggagagaattgtaccacctactgaatggctttgggcgcggatcgaggtcgtatctcaagagtcgtggcccagtatctcggttaacatcgagcatatctgcccaagtcttcggacgatggcgttcttgcatgtagtagatgagcttgaacaaaaacatatgttgaagcttgacatttgacttctttctcattgtcatgggagtcttagtcggttcctcatagtggattccccagaagtaatgcttcatcaacacttgcacctgcggggccttcaaggaacgactggaaccatgtgcaacagatgaaaacttggtattgaaatgtgaccagtcgtcgggtgggttaggaaggcgtgtaaagtcgtaaagtggtaagggtggaggcggctgttcgagctcctgcggcctcaatgggaaatcggaaaagagaggaatctcgagcggggagaaattactcatctcgacaatctgaaagtgaagaatcaaagtctgaaaagtataccacgacgggctcaatcgagagcaatatcctgatattggggtgtcctatattggtctgaggaatttggaaactatcaactagaggccaaaacgaggaaaaccaagtgctttaatggacaacgaggaacatccattgtccaatgtgccggcatgaatgccatatttatcaaggaaagaaatagagtgccatattgtagacggtaagcatgagatgaaagaacacatcgagcctctccccgaatcgaaaacccatggtaacatcctctttcttgatgaacaaagcacttagaatcgaggcaagagttagcaccagggcagcatgagagtggggaattctatatttgtcacactagcacatagcgtcttggtcgaggtcaatcaaagaacctagtaaaaatagaaagtaatactattaatggcagtgggattatggggatctcttaacaaaccaaagaacataacttatcaaatcgaagatcctatagattggggttccagatccagtgcaggtaatggatgttgtggcatgttgatctcttgtttggccttgagtaaacctcactgggtctagaaataaccatcaaagtgcagaagtgattagtatcgagctagagatatcgaacttcataaagcaagtgaatcggagcttctggcatcgtccgccacgaataaagatatgagctaaagcatgtacgggcctgcgggtagccaatccatagacttaagaaacgcgaaataaaaacttaaatcaaagagatgacagtgccacaaagtaaaccaatgtatgaacctcatgaagggttactcgaagcacaaagagacactttgacagtggctgatcactccaggaattgggttcgtcactgtttcatgtcgaggaaaacaaagccgtctggtcagggctgcaggtaaaatacgtgtaaataacacggcagattacccgaatgtaacaccgaaattaacagtcatgtgactgcacatgatctacattacgcactagccatattgggcctagtcccgaacaagcgagccctcgtccaaatcgggttagtgctccaattacccgatcccacaagcaaagtcactcagttggacttcctctctccatccctctgtcgacaacccatcgcgatcctcgcccatcgcccatcatgtgtacgtgacgaccccttctttcagtccgagagcattatatgatatacaaccacgaaattgccaaaaaaaagaaatgctggaaacgactgcagagatggcagttctcgaaattgaatgttggctaacatggcggtttctcgataacagcgctcgtgaccggcgataagacgaacttccagttcatcttgcgtctgctcaacaccaatgttgacggcaagcagaagatcatgtacgcgctgacccagatcaagggtgtcggtcgccgttactccaacctggtctgcaagaaggccgatgtcgacctcaccaagcggtacgttcgccacaatccctatcgaatattcaatcattcccatgcatcatctgttattggagggaaaactcgaaagagacaatggaacagtctggaccggaatcgacctgcggactaaaaagagggggaatatcgcacaacaaacaaattttctacaagaccagcaaagctgacaaaacgccttctatagtgctggtgagctcaccaccgaagagctcgagcgcatcgtgaccatcctccagacccctacccagtacaagatcccttcgtggttcctcaacagacagcgcgacatcaccgatggcaaggacacccaggttgtttccaacggtctcgactccaagctccgtgaggatctcgagcgcctcaagaagatccgctcccaccgtggtctgcgtcactactggggcctccgtgtccgtggtcaacacaccaagaccactggccgccgcggtcgcaccgtcggtgtcagcaagaagaagggctaaatcattctgttcgcttttttgccgggggttcttggagggattccgttatttccggtgtgtttctatggacactcgtgggaccttttccccgctgtcaaaaaattgaaaatgaactataccaatgaaatgaaccgatcttttcaatacgtatgctttgcttttagccctgggtttgatgggtcatactttgtggaacaatttgccaactccatgatcctggctcaatcctcggccctcgtagggtagaatatcttgcaagcctccgtggtataattcgaagaatacctttctgtgggggtagaaagtcctagaccgtcggtgtgcctgagccataggtcaacaactatggggttctggggttatacctgcactcatgcatcatccatgcctacactacatgtttattactcaatgtttgagtctatccaaaatttattgaattcaaagttgcctagttatataccaaacaaaagccaaatcggtaggaaaacatagtatgcggccttctgaatttcccagagggttaggtgtcaaattgtacgcaaacagccagtggcaagatcaataacacgtagtgtaatgataagttcatcaacgcattgtatcatatagcagctcggttgagtgtttagaaccactcaccaccgagccagcggttgaagaaatcgatactagcctcaggctggtccatgggaaccatgtggccagcaccgaagatacgcatgaaggtgaagttgccatgggacttgatctgaccgatattcttgccaacgtgctcgttctgtacaatcttgaggtcctcaagcttggcggcagcgaactccttctggccaggccactcaagagcctcggaccaggccttgttgccaagccagttgcagatgaagtcagcatcaccagcgtagatcagaacagggatctgctcaaggagaccgggcacgaggcggtggtaaggcttgaaccaatcgccgttgaagaggaagttacggttaatgtcgaagttgcatgagtcgtagccatcgacctcagcaccgacggcctcacgcacgctctcctgaccaaggtactcgctgacgtagcccatacccttgtagcacaggttgctctcgtcctcacacttgccgcgaatatcgtaaacattctggccggtgcgctggtagggaccaagcatggcgttgttgcagtagatggaggccgggacacaaacccaggggctctcgctgttgtagcaggactgaatcatgctttggcagcgggccagggagttatccatggactggcaggtgctctcatccagaacagcggggtagccaccctcgccgcatgccatagggcggtagtactcgtactgagtaagaccgtcggtgagaccgttaccaatgagaacagacttgaggttgatgttacgcttcttgtgggagagaatctccgaagccatgacaggaatatagtggccagcgtaagattcgccagcaatgtggaagtcctgtacagcgtactcggggaattgcttgaagaacaatgtgaggagggcatagacgtccttgccagcagcaacagtgtcactgacagaggagccactgtaggagtagccgacattgatgggctggtccaggaagatcacagaggcattgttgttccacgagaaatcattgtaaataggcttgatatcagcaccgatagagctgggtccaagttccaagaaaagtccggtgagagacgagcagccgggaccgccgttcagccacaggataacggggtcgttcttggggtcattgcgagactcgaagaaccctttcggaggttagatcaactttagatgatgaatggaggctttccgaacttacagtagaacaagtgcttgtcattctcgttgtcatccaggtaaccactgtactgcttcacaccggggtcgatgccgagagcgctggggtcaaccttcttggcacggaggctgtagtcctccagcttgccctcaacctcacgctccttgacgccctcggcattagagacccagatgtcttggacttcagcgccactgacatggtaatcccagtgcgagtcagggcggcgggtgtgcttcttgggcagggaaagcaagggagcgctctccatggactcggggaagtagttagacacttcctcccagagctgacgagcctcaccagaaagagacttgaactggtcctggaggtgctgcaggggcttgagtgcatccgcaccctgttgggctacgttctccgcatactccctgtgagctccgaggacctgctggaagggcggagcagcggccgaagcagctcccaccaagagagtggcggacaggactctcattgtgtactgtgtttggatttcacagcaagaatgatggtaatgagctggtgatgatgaacgggtaccttggggtctggagttaggcacctcttatcagtaaccgttgggagaatggctctcaaaatgagccaaaggaagttgatcacttacaatttgaagataccacaagatgattgataattgagacaaagttgaagggttggaagaagcaagacggtgatgccttggggcttgtgagatgaggagaagcaggtcccttggccgatgacgccggggacagtcgataagacgagagggctgggccaatcagatgaccccaggaagctgcccgaccccatgacccggatgagtcagcgtgagtcacgggattccaaggctacgaggggcacgagcttttcgactaagcctttttgggtaaattgcctgacgcaaatcaacttttgatacttcggactcagtctacatatatccttcgatcttgacggtgccatccacttggaaacagtattcaaaaatatatcttgaatcttactacattttctggtgtctgttttttctcttactgaagcaaccagccctcagcggctttcacacccaaaatgcctatcaaccaaccctccaaccagatcaaattcaccaatgtatcggtggtccgactaaagaagggtacacttctatcttacctatgttccttggacgtttctaaccttttatcctaatccaggcaagaagcgctttgaactcgcctgttacaagaacaaactgctggaataccgatccggcgccgaaaaagatctcgacaatgtcctccaagtcccaaccgtgttcctctccgtctccaaagcacaaacaaccccaacagcagagctagcaaaggccttcgggaccggtaccccacgagaggaaatcctccaagagatcctccgtaaaggcgaagtgcaagtcggcgagcgtgagcgcaaagacatcctcgagcgagtggagaaggaagtgctggatatcgtgtcaggtcgactagtcgacccctcaaccaagcgcgtgtacacctctggaatgatccacaaagcgttggatcaattaacctcggccagcggacaacaacaggcacattcgagcggggaggtgaatggagatggcgaggagaaaccctctcagccgaagaagccgctctggacgggagtttcggcgaaccgctcggcgaagagtcaagcgttggatgccatgaaggctctcatcgcctggcagccgatccccgttatgcgagcccgcatgcgtcttcgtgtgacatgtccagtgtccctgctgaagcagtctgtcaaggctgccccaggtgcagcatcgaataaggagaaggaagccccatctggtggctcaaagaacaacaagaaagggaataagggatcgaagaaatctaagaaggacgattcagatattgaggctggtcagtctgatgtggaagcacccaaggccccgggcaccgtcaaggacaaaatcatggcgttcatcgaatcagttgaatcgcaagaagtcattggcggggatgagtgggaaattgttgggtttgctgaacccggtgcgttcaagggattgaacgagttggtgagcaatgagacccgcggaagaggccgggttgaggttctggacatgtcggtcacacatgaggattgaattatgacgtttgatttctctaaggctttactgtacatgatacgatatgactgatgacaaaaagtaaaaagaaccttgaaatatactggatttgatatgccatcacattctgccgcagtaaggggaatacaatgccgatgaccaaagtcttttctcacggaaaaagcaaagatgaagaaatgacagtcgaacaatggagacatactgcggggaaggaacacatactgcagctgccagcagctcgtaaaaacagccactcaacgtaggagagtatctttgcaaaaagaaagaaaagggccaggatctcaagtatgatagctcaaagtataatcaacagccctgaagcggcgtatcattgactcgcaacaagaaattaagtaacaatatgatacaagaacacgtctaggatatagacaaaggagagtagaaaccccaacaccgtgagaattgcttattcccaacaaaaagaaaaaagcaatcactgatcatcgcaacgttcgagccaatcagacatccccaggtacgccgatcttgtcacatccagtcaccagtaaaaccacattcttgcccgggccaagttcgctagcgagatccagtgtcttggctactgcatgactcgagtcaagaccgggcaaaatgccctcgtggtgctgaaggattctaaacccatccagggcaaccgcgtccgtagcagttgagatttcaatccggccagagtccttccaatgggcgacctcggggcccacagtagacaagttcatgtcaggtgaaatggaatgcgaatcaagtatttggccatcgtcgttttggagcaggagagtgcgggcaccttgtagtaccccaagtcctccatctgtcagggtagctgccttcgcggcttccacaccaatcagacgaatatatgagtcatggaggaacggtctgaagagaccgattgcaccgctaccactgccgacggcggtgacgagggcatctgggtgacaacctactgcctcgtgcatttgggctgcaacctcctcgcctagaagggcttggaacgtacgagccagagtcggcaggggactaggccccaccgggctacccatgaggtaatatgcagattcgtgattgcagaccgcataccgcagggcttctgtgatggctgcgcgtagactacccatgccggagggggtgcgggccgtcaggaccttagcaccgagcgatttcatctcgagcacgtcctcttcctgggcactagcgtcgtctgcaccaatgacaaccacacatcgtaatcccagacgcgcgcacattgcagcagtgaatttgccatgcttggccgaggcacaatctgtgacgatctcagagcggcccatccggcgagctagcaggacctggccaattatgttgcgggttttgtgactaccatattcatttttgtcctcacgcttcagccagatagtagcacctcctgctaaattggtcaagttcccagccatgtgcagtggtgtggcacgagcacgttgaaacgtggcatattcttcccagaacgaagggtctgagacagcggcctcgaagaatgatgtcagctcgtataggaatcccattatggattcaggagcaaaccggcccccgtaggagccatagccatcaaaggtgatctgcggggcccgcagagtgccatctgactgcaggatgggggtatacgctgtgattgtgttcaatctcgatgtggagatagacttggcaggtgtatcggggagcgtggatgtggttccggtgacagttgatactgtcgttgctctggtttcgctatctgaggcatttgtcgactcggtttgtgtgctactatcacaactcgagggggaaaccgaacggtttctggactgtacactgctaaccccttccgggcagggattagcaattcgtgcttgagcaatcgttctgccagcaggtctcaagtgaatgagatcttccacattgtccgtgccatgtgttgcgagatcagtgggatcagctgatttgggagaggaaaagcaaagaaaacggcgcagagagcgaagcatgttgtgctttacccttcggataaaagtagaagctggattgatgttttagtaagtgattgacaaataatcatagagccataaaaaataaagagaatggatttgaggttcgactattcagatcattcagatagaagttagggcacggtacagtgggcgaaaggtgcattaagtatgcatttagatatagtgtgaacgttcctgccttatgtcgacctttcagctcgtcaggcgaatgaatcggaaagttcgatctcggattgcctttcttggccgactaggttatctgaccggctcttctacttctttcacttatgagtggagtacatatggcccgtattgtgaggttacgtagtggagcggtagaaaagtatgaacaaatataaccgagtgccaatgtcattgaatctattcagatggagtatatagtggaagatttgcctcattcctgtatatcatagaactatgtagactcggagaaaaggtatccatatagttctggttccccgagttaaacagcttcctatttgattgctttgtctgaaagattgctatccagaacttagcaaccaggttaaatactctgtacatacagggtaccgagaacttcaaacatcattccaaataagcaaaatccttctatttgcaatgaaccgcggcagtgccagcagtgtgactcaagcccaacgccaatgatgtgatcaagcctgacctagtatgatcagattccacatcttaatcgaggcgtgcaactgtacagggatgtagctcttaaaagatcaatgaaattggggcctccagggcagaatctcatatatgctgtgttacaacacccgcactcccagaatagtcttgtctgtttcacaaagtgagccttatctcaggtcaaatctaaatccacagcatgtaacattccagacaccgctccacgtgtaccgtttctcggtcctacattcaaatgactcggttcatataaaatgaggcattttacattctatggagtacagggctctgatctaagagacaaagacaaaatttgactacacttacgcccggaactgtccccggacatatgtcttttccccatcgatgagatgctcctatgccctcaattggcatatggatcggattcattcaaagatctctttcagccatatcttccattcaacaacacatccttttggaaatatttcaaagacaagctttcaacttttcagctaggacttcggaaattattgggaaatttactactctcaataaaaatggaatccactagctagtagctttatcgttggcatattgctttttgttctatgtgatccgatcctcgccatcacagcatgccaagcttacgcttattgattgatatcgatggtctaccaaactgaactgattccctagattcctgtactctacattgctcatgtgaataattcatagatcgacctagggcgaagctgatcatgtgatatacttaataggatgaacttcaaccaatgagtactcatcaaagaatttcttttcctttttcttcgttattgctttcttcgttattgctttcttctgatgtattattttatagagagctattggaactagccaaaaataaggttgtagaatttctatggtcggaatgtggattataatgtggatacagggatacttgggacgaatacttctggtacaaactcgaattagcaaaagcttcattaaacagtatgatgtattaatgcaagtcgcattaatacatgtaggtactagaagacactgcatcgaaaccatggactcaaggctcagtatggacaacaagcttcattaatacatatcaaggcctctgcatctacattttagagtgggaaacatggcgaggagagcgaaagcactgaagcattcaagcatatatcatacaggagccaattctcaaattttccattactatttcagtggatcctataacgaagaaaatctgcagttgtattgctacattacaccaaggggaaaagctgatactcaaaggctgatcattgatttgagcgtcaaaagttatacgtcagtcaagcgtcaaagaaacctttctaaccgttgctctctagattcaggatctcgatgagcgtttgatactgccggtcaagagattacgatcgcctgcacccgctccagctcttagactaatgtgttcttggtccaattgtttatcactttgacatgcattttaatcagaaaaaatcgtatattctacctaattcctatatgacttagctcctcaatgataaatcagttgatgatgattcataaagcagttcaaacgtcatatgatacaagtaacttaattttactaggagtttacatagaagttgcaggtatctactgtcttgtatttggagtttgaaacgaaagcggtgtctaaaactgtaaggcggtataggaagcggcagtaggcacaatccaaattaggaaggcggcgactgaattttcaggcaggatgggtcatatcaacacccataatattctatcacctcacctacttcattcgacaatctccacgaaaacggatatcacgaaaacgaatatattcgcggaaacgagcgtgtccgtgaaagtgagcatgcctatgaaaatgaaaatatccgcggtaactgcgtaaccgcgtacgccaacccccagactatataatatgctcttggtctacttctctaccacctcatctgcttcattcgataatgtccgctaaaacgagcatgtctgtgaaaacgagcatgtccgccaaaccgagggtgtccgccaagtgtccgccaaaatgaatatatccgcggcaactgcgtaaccgcgcacgccaacccgcagactataaaatatgttctcagtctacttccctactacttcacctgtttcattcgaaaacgtccgcggaaacgagtacgttcccgagaacgagcatacgcaatgaacaagtccgcgaaaacgaaaacgagcagtgtccgcgaaagaaagcatatccgtgaaaacgagcatatttgcaaaagcaagcaaattcgcgaaaagtggttcccggaagttcatcaccattgtatttcgcggatatcaccccgcgctaaagattatggaccgagcaatcctagccagagcaggaaagcatcctggaaacattccacgcctaactcataggtcggagagagggacgggcgagcaactggtaaattcactggatcctttgttcaaaggagttgctttctatggatattgagtactacaacaacgaccatcgctgcctcggtatgccttgtctcattgtcggaacgtgcgagatgatgctggagtacgcgcaagctcgtccagcaacgtggaggatgatactttggaattgaaataccgatgtcgggattgagagaacagaatgagcaagatggttctgcctttcatcgaggcatctctaacaacacggtctttatgacgcttagattcaaaatcttgtcccagattattcaagtttcaagcatgacgtccttgatcttcctaataacctcacacaagagtagaagcaaacttggaaacattgtctgttttcagcgacgtagatatcgaagtctgtgaatggatccccccgccaccccgatccaggcctgggtgacccgcggtcgacctgtgtagggcaacgaatagggcattgtgtattactctctaagtatttctcattcttagcgtatatatataggattgatctggaatccacaaactgtatgtccagattcaagaatatacggcaacactatagtggtattgtcgagttcctcactgtccctgccattcttcggcctattagatggaggacgtgattgggtgcaatcggaatagcatcacaagtgtaactactcgacaacgcacaagtcatccaccatacccactgaaactccatgaaaacccagccgatacgaatcacgaccagaatagagcgatgtgcgatcttggcgcgggggaaaagcttggctctaggcggggttggaagattcttctcgaacaactgcacgatcttagatctagagcgatccatctcgatcgtgcgttgtacctttttgactttaattgatttacgagagttatagttcaaaaaagcagagaaattgagttctagtaaggttatctccagcagcgttaaaattttctctagaccatctatgagagacattcgcgacgtgtatatcgtgataagagagcaatggctcgcgaagacaggggtggatgggttaaacccacccaaagcaaaaccgacagatcccaccgaaaaagggaaaaaaaaaagcaaaaatcaaaaatcaaacagccaaaatccgtaacgggtatacgcttagatgcaaatgcatgacaggtaaaaaaggaaagacagtcgctgaccgacagtcctcgacatctagtgaggagtgactcggtcgacgatggggttcagggatggagatgcccgatcggcaaagccaaaaaaggtcgagtaaataagagacatcaagtcttgaggaatggaagggatgattcaaaaggaacaatctcctggatatgaagaaagtagggcgatattcaggcgcagacctggatagcgatcagggcacgggcgagatcctctggggcaaaagggaggtccttccgggcggacatgacgcacggggtcatggcaggcgagatagcccggacgagaggtgatgaatagcggacggactccttgaggaagaacttgggctctctgacatcctctgggatctcgtagatggagccctcgttggtgagggtcatcattgagccattgtagctggaggagttgacgatggtggaagactgggagccggagttgggggcgcgtggcgaagattctgcagggacctcaggaagggcatcgactatgagatagaagttagaattaattttttctaatagggctgggtgatttcgattagggctggggatgcgtacctggatcgacattgtccggggacaccgaaaagtcagtatcggaagggccggagtagccgtcagacacttcaaaagtggtacaaggtgagacggagtcgtcgaatgaacgagtccgttcgaccattgcaccctggaaggaccaagcggctaggctcttctggtgggcacgatcgaaaggaccacggaatttggacgggggacactcgtgtcgcctatagtattcgaccttgggctttccatcatttttggatctggagcggaacacccgcttgaccttctcgcggaagttcatattggaagaaaaaaagaattgggaactgggtattcaagatttcaaattcaagaagttcagagatcaatgcgggcggttcctaaggaaaatgcctcagaggtgcataccactcccggattgggaacggacgcggtgggtgtgcaagcacgaatagcgggggttgtgtgagagaaacagtttaaccattctatgaagatatagagacagggaaagggaaagtaaagcaaagggaaaaaaaggaaagtgaaagaggggagagagagggaaatgcgggaattatagtcgcaggcttatctttgccgttgcatccacgttcatgtcccaggtgggatggatgtcccggttccccagaagcgtctcctgtccagatgcggtatattggggggcaatggtccgtacggagtaataatggtggaatccactgtctgtgcgagagacatcattatctgctaattggtttggtacggggtattctatattcgaatgttctatatagttagggggatgttgtactccgtacacaactagttactccatactctaggtaagcgatttaatccccgattaattggtccgagaaatagccgagtctgggctgcgattctgcgaatgtcacggttactgctacactttagggctacccagcatacttacttctgacccccggtgtatatccccatggatgtatgtcgtaaatcaagtataatggaactggtcattccttgaagtcagtggcgtatattgtactgcagcgaaggcttccagaactcggtgagagcctcacggttacatcatgttacattttgcatgttgtaagaggatgtgtcatggaatctcaactgggcgcaggaataaaccggaatcggagtggagatgaacttgcgcagttgcccccactcggcacgtttttgccgggcttgcctgggaggcagcgctggctcataaagcacattaatttccatttcacaacgaggccggctggcccaatggcaaggcgcttgactacgaatcaagagattgcaggttcgatccctgcgtcggtcagtttttttcttttgttcaatttatatattttgtataacgtagttagataactagttaaacagtctgtttctgttgtcatttatctcttttttaaaatagttatacagtgtagatgtagagattacattggccttgattactagtttaggagagctgctcactcaactagtaattaccaagttgggtaactcttgaacgtttatgcatgtcatacaacccacccgtaactggcatattcacatctagtgggggtaccctttctgactcttccaagccatggaacttccatttactcatttcctattttgtgactgctatttttgtctttattgggatctgctgtttcagagatgatgtaatcgctatttggccctttcaccaagaatgcccaatccctgaggaactcagggactcaggaatattggcacacatactaagttaggctttgcgcctttccccagatcatccttgagccccctgattaccttgattgccctgactgctctgattgccctggtcggcccctagttgtgcaggcacaaccctatttacccgatgcagacgttagggctggcccaagctcacacgacaagggaactatgaaagagatgtcgcatgcggaggaatgcagagggaaagaggacaaaaagagacagacagacatagaagagagtcttccaatttgaattgaattgaatgcattgggatctaataatagttatgaatccgtagggaaaaaagagattaaatttgtgatactttgtgttccagaattgtcctcaccacggatccaacaaccctagagaagagaacataccgcgtcatcccttacttgacttcttccctcctacacttcactaccatcgtaagttgacttatctttccttcatcttccatcttctgaccagcgcagaatcaatacaatcaccatgggtaaaaaaagcggaaagaagaacaagaagggcagcaagcccgtcgcggccgtagagagcgccaaggacgtggtgtaagttgaaaaattcaacatgatgccacatcaccatctaaccgttcagtgaacccgagcaaaccgaaggccagactgcgaccgaacagactgcgcccgagactgcgacacagcctaccgagaccgtcgcggagcctagcaaggcgcccgaggccacccccgtgaccgaggccgcaacggagatcccagctgtcgcagagaccaaggatctggagaccaaggaggctgtgaaggccgagcaggctcccgcgacagagggtacggtggaggagaccgtggagaaagtgcaggcctccaaggccgggcagttgggcgagctggacgatggcgctaccgcaggcactggtatgacggcgtgttagtaatatgcgatgaattccgactaacctgaaatctgcagtccttccggagacgatcactagggagcccgcttccttggacgtcctgatcggcgctcctgcgacactggtcgagcgccccaagacctcagactcaaacgcccccgctgtcgctgcgcccgtgcctattgccgccccggccgagaccgacgccgcccacacgaagcgcccgtacgagaagcccatcttcaccaacgaggataacttgaagccccacaagatgcccaagaccgacgaggaggcgattcaggctagcgtggcggaggacaagaagaccattgagaccttggccggtgttggaccggctacggctgctgcgttgaccacccctgagcctgagcctgttcaggctgaggcacccaaggctgttgtggaacagaaggagactcctgtggttgttgaggcacccaaagtcgaggagaagaaggtggaggcacccaaggtcgcagaggagaagaaggtcgaggcacccaaggctgttgtggagcagaaggagactcctgtggttgttgaggcacccaaagtcgaggagaagaaggcggaggcacctaagaaggttgaggagaagaaggttgaggagaagaaggctgaggagaagaaggctgaggagaagatccccgtgtccactcacaagaccacccctgctcaggccggcgccccctcctctcccgtagcggtcgccgccgcgaacgctgccattctcgcttccaagggcgacaaggctgctgctccggccgccactccagttgtttccaaggaggccgagcccaagaagcccgaagctgccctgaagcgtggcgacgaggcacagcctgaggaggcgttgcccaaggccgaggagcctaagcccgagaccaagaccgaagctgtcaaggaggaggctgccaaggcccagcaagatactcacaagacctccgagtcaggatcgcaggccgagaagaagaagggcgggttcatgtcctggctgaagcgcaagttcaaataagtaaagtaattgtggagtgcgagagcctgtgtatgatcagtattgtacgctaggtggggatgttggggaggggggcttgcaacctacgtcaggctgccttggttttgtttttctttcttttgtcagctttgatgatacacccgttgaaattatatatcagatcagaattatagtgcttattatggtgtcttgccttggagtgaatgtagaaggaatattgtttcaagttgacttcgagtcgggcttggtgtcctcatgtagttactccgtacaccgctagtcaaatcaattctccaggtatttcccttccccctggcgaatcaatattccaatattccaagctcgtcattagcaggagcccactggttgcaaccaatgaaaacgacatcgcaacgcaacgtgaacactatctctcagtggagacactatatcaaataaatctacgactagtgggccagcggagtcgatccaataatagtttctccgcttctattcttgcttgtgggtatacactagttgtatagaaatgattagtatcgttatacaatgcttgaccatttcgagatcgacttaccaggtcgcgttcattataggtattggtgtcatgttctgcagcatgacgcagttggtagttcgttcttctggtacaattatcaacattggaaactccagcgctctgttttagacgtaacatacctttacccaagacaatatagttaccgggattcattggcattagttgctgtgtcggcatcgaggcacttgaagatttccctccttgaaatgaaaaagaagaatatgaacgagtagtagcaatacagcatctcggcagatatatatcgagcctactatagaccaaacctggaagcatcactatgtggaggaagtggtaaaagtatgcgagacccttgcaggctgggaaagacctatgtttggtggtgtggacggaaaatacatgcctgaaaattatctcaccaacctctacaatcgggactttcgccctcaagaacttaccgaaaattgtcaaatgctgggtatggattgctcgacattcgtcttctaccatgccgatctcggtccagtaaacatcattgtggaagatataccgaaagctggtactattgggatcattgattgggagattgctggttatgtcccaaaaggatggatacgaaccaagttccggttgtctagtggactggatcttcccgacgcgagccccggcgaggagtcatattggtggaggtcggaggttcagaaattactagaaaaacgtggattcgtggaccatgcgaaagaatggacggcatggcgtcgaaataaacctatttcgcagacgaattagtggcgtggaaagtctgtagtggcggtatgatacgatgctcaatgtatgtgaggcgccaggtcgatctgaagaatagaaagagtgcattcaactaattaactgagatgaagaaagaaaaaagaagcaggttgcaaggtggaagcagcctgttgatatagctgaccctttgcaaacgttgcaaacctcgaaccttcttgcttagcgatctagcaaacaatctatctagcaaacaatgcaaacagcagatagtcgccaatccgtagagtcatagaacgggcagtcatgcagatggtaacagaataggactagattccacatctccatgcggggtccccgcagattatgtgcccgcttacaatatttcgggcctcggtaacctgggaagagcataaaactagttgattgatgaaattctacatccttcactcgcataacacctccaattcttcaagatgacatcccttccacgtaaactatggcagcacccagccccagagtcgacccaaatgggccacttccagcgcgacctagagcaatccaccggacgcaagttcgacgtgagtgaatttcgcctgtctaacgataatatccacctaacatctcccagtctttccatgatatgtacctgtattcaatcaagaaccgctcggcattctgggaattctgctggaaatacttccaactgattcacgagggctcctacacaacggtagtcgatgagtccgtgcgaatggacagcgtacctgaatggttcgccggtgtgcgtctgaacttcgctgagaacctgcttttctcgcgcgttgctggcggcaagacagataaggaggacgacaagatcgccgttagtgaagtccgcgaaggcgctgcccatgaggttgtccacctcacctggggtgagctccgacgacggactggagcgctggttcaggctatgaaagctcatggggtcattcggggtgatcgcattgctctctgcgcggcgaatagtattgatacactgcttgtacttctggcatcgacggctctgggagctatcttctcgtccagttccacggatatgggtactaagggtgtcttggatagactgcagcagataaagccgcgctggctgtttatggacgacatggcggtttataatggcaagaccattgacctgcgatcgaagatcggggaaattgttcaaggcatggcatctgatcctggattcgagggagtcgtctcaatacctcggttctcttcgcagccggccgatatcagttccatccctaagaccaagcctctggcggagtttcttgcaaaggcaggcggcaacgagagacttgaatttgaaagagttggattccgtgatcctttcttggtggtttactcgtctggcacgacaggacagccgaagtgtattgtccattccgtgggcggcgtgctgctaaactcgaccaaggagggcagattgcataacgatctcgggcctgattgtgtcggcttgcaatacacgaccactggatggattatgtatgtgggttccgtgaagacgttgctctttggggctcgggtggtgctgtatgatggaagtccatttattccaagtatcactgcgttggtcgatcttgcagcgcaggaaaagtaagttgttgacatccacagatgtacatttacagttatcggctaatcaattgcagggtgacccaccttggaatctcaccccgatggctgcatgagttacaacaggctaagatcaaaccccgcgagaacgtcgatctcagctctttacgggttgtcacaagcactggaatggtcctgcgagatggattgtttgagtggttctacgacgaagggttcccatcccatgctcgcctgaataatatttctggcggcactgatatcgcaggatgcttcggaaccggcaaccctcttgtccccttgtatgttggcgggtgcgccggatgtagcctgggcattcccgtggaagtctacgactctacgattgacggcggcgacggaatcaaaggtgtacccgttgaggagggtgttccgggcgaattggtcgccacctctgcttttcccaacatgcccacactgttgtggggtgacgatagcggtgagaagtaccacgatgcgtatttcgggcgattcgatagtgagcgccattcacccctccatgtgcgtaggactacagtcactaaatctgtacagatgtgtggacccacggcgatttcgtctccatccatccaatcacaaaacaaatcgtgtttcacggacgcgcggatggagtgctcaacccctcgggagtgcggtttggatcggccgagatctaccgggtgctcgagggtcaattttcgaaagagatagcggactccatctgcgtagggcagcgacgaccaacggatacggacgagcgagtgatgctctttttgctcatgagatcaggggtagcattcacatcggatctggttgcacgagtcaagaacgcgattcggacagagctcagcccccgccatgtgccgatgttcacctttgagacacctgagattccggtacgtactttcatagggaagaaaagatctacaaaagcgggactgacccagaacatcgtcacagaccacggtcaatctaaaaaaggtggagctccctgtgaagcagatagtctcgggaaaaatcattcagccctcgggtacactgctgaatccgaagagcttggacttttactatcaattcgccaaggtggaaactctgcgccagagtaagctctgactggacccttggcctgaggtctccataataagaggggcagaccggcttcatcgggatcgtcacttctgccaagcttttatcaagctttccagggttagcaacgggatcgcttggaagttgtgtatatgaacacgtagtcgagagaaagtaggttggaatacgtagattgaattagactggattaggtagaaatactgaagatcataagtctaaggaagaataaagtcgaagaaggacaagtagagggaagagctgagggctgatggagtgggcatccactgcgtcatcgaagcttttcgatttaccgccgacgttttgccagcgacacggagcacggagggtatttatacaattcgatacgattaattacgctcgatcgtattttactccaccgatctgccgccaaatctcttcctcacctggtaacatcgtaacctataaaagtactcccctccccgcacgtctatttaccgttctcattacttcttcaaccctctccttctcctcaatctctgctttttcttcagttctttttgacctggtctctttctctcttgttttttaccttttacctatcatcttttattcgcaattatggttcatctcgccaaagtcaagaaggacagtgagctcccctcggctcgtcaatttgactccattccccccatcgagacaaatgacgccgacaccaatgtctacggcactcactttgccgtggaccacatgccccagcatgaaatgccagagcgggagatgccccgccagatcgccgctcggatgatcaaggatgagctgagtctggacggtaaccctaagctcaacctcgccagtttcgtcaccacgtacatggaagaggagatcgaggagatcatgaccgactccttcagcaaaaacttcattgattacgaggagtaccctcactccgccgagatccaaaaccgatgtgtcaatatgattgctagacttttcaacattcccaccgatgccgccagtgagaacgccatgggtacttcaaccattggatcttccgaggctatcatgctgggcacactggctatgaagaagcgctggcagaacaagcgcaaggccgagggcaaggacttctcgcgccccaacattattatgaacagtgctgtccaggtctgctgggagaaggctgctcgttactttgatatcgaggagaagtacgtcttctgtaccgacacccgcttcgtcatcgatccccagcaggctgtggatctggtggatgagaacacaatcggtatctgcgccatcctgggtaccacctacaccggcgaatacgaggatgtcaaggccatcaacgatctgctggtggagcgtaacattgactgcccgatccacgtcgacgcagctagtggtggcttcgtcgctccattcaccgaccctaacctcgtctgggatttccgcctggaaaaggtggtttccatcaacgtctccggtcacaagtatggtctagtctaccccggtgtcggatgggttatctggcgcgcggtggagtatctgccccaagaattggtgttcaacatcaactacctcggagccgaccaggccagctttaccctgaacttctccaagggtgcttcccatgtcattggacaatactaccagtttatccgcctgggtaagcacggttaccgtgccatcatgaccaacctgactcgcatcagtgacttcatggcgtcagagtttgagaagttgggcatggtcatcctgagccagacgcagggcaggggcctgcccctggtggcctggcgccttcccacagaccccaatcgggtctacgatgaattcgctctggctcaccagctccgcgagcgcggctgggttgttcctgcgtacactatggcgccccacagcgagaaaatgaagatgatgcgcattgtcatccgcgaagacttcagcatgaaccgatgcgacagtttgatccaggacttcaaacttgccattgatactttggatgcaatggacaagaatatgatggccaagtacagagtgtgagtttattctgtcctaatgtttcgattttcatactaacagctccacaggcacatgaagaaccaccgcaaccaacctcgccaccagtcgcttattcaccgtcactacctggaagagaagcactcgctccagggcaaggatggcaagacacatggcgtgtgttaattccgttgtgtaactgcctactggcggtttttgaatatacgtgcaaaaggattgaattagatgggatgttgaaggtggatatgtcagtcctacacgcagagtatcttgtgtcctcactacaggatccaactcattgggttgatctcttgctgtagtatatacaccacgatattgaaatgaacaaatcgatgaacatgaggttgagactggccatggcaagttagcgcgttacaagaaacgatatagtagaccacagtcctattcgggaaatagctgtcagttacatctatcgcttgtgatgtcatgcatacgtagatttatataccaaagccctctcgtgctgcaacggatgcttgcatttcctgccattatcccctcactactcatataccatgaagcgtatctcaatcgacccgaaggatgatcccccaacccgagacctcccactggcgacttccaccccggcgcaacttcccccagccaaggcgacaaagcttcatccatccaaatcaggcgaagagaacgcaaccctgttcttcgtgggaacggccacaacgattatgtcagttcacatctagaactgtatcagtgtgtacgtgtactaaaacaaagcagagaatgggcgggaatacggattatgactgatgtcagctcttgatgggaagtcgaatgctcacagactaactgtcttagcccaacttcctccacgcaggcgaacatgtccacctcggtccaggcgtgtcaagcgagcgcctcaccaacccggccgtcgacctgcacgacctccctcggattgatcttgtccttctttcgcactatcacgagtatgtctccgagcatagaggtattgagcgatcactgataatgtcagggaccattttgataaaatggtcgaggcttcattgaggcgtgatctacccattatcacgacaacacatgggcaggagcgtctcgcttttaagaaacaggacccatttacgtctgtatgcgcgcttaaaccttttgagcagattgaggtcaatattgaaggcaccgaaggccccagacagccccgcctgcgtgtgacgggtatgccggggaagcatgtgcctcctaagcgagtggtagagaagctcaacgcgctagctaaggcggtgggtggcattttcttttctagatattcctactagatggcaatcaacctaacacagcaatagttcccaccaacgaacggctggatgctcgagctcggccacggcagctccaatgctgcagacttctcctgcggttatcgcatctacatctcgggagacactctgatggtagacgagctgcgcgaaatctccaagcgatacgcggaccaacgaatcgacctaatgctcgtccacctcggcggtacaaccattccttctcccttagtaggaagactaatggaaccgctagcgttgacagttacgatggatgcggggcagggtctgcaattgatccagctaatccaaccagacgttacgatcccgatccactatgatgattacgacgtatttgcgagtccgctagaagattttcggcgcaatgtggaggcggcggggttattgaacaaggttgtgtttttggatcgtaaggatcagtattgctttcgagttatgggatagaagtgcctaatagtaagacattgggtttttgtctgttcagctcagccctggacgcgttggtctggggctgagaagggctccatcacatatttcgactccaccattcttggcatggggaatgggacttcatacgagaattatgatttacttcgccttgagcggatcttttggggaatttgggggcagtttgtaaccgaagtatggtatgtacataataggtgacgaggctctacacatggctcgtatagtgtgtttctctatgttgtatatcgaaagtattgggtcaaaggctttctttcgaatcttcttctttgagtgttcatatattctatattgtagttagggcggatatactagagagatgatatctacacttcctaacagttaatcggcattatgtcttatatcagatactatgctattctctgtctcatatcactcatttcattcaattgctatatactctggcatcccaccaaggccatccattgtttaccctatatatagaacaacctctccaatcaccgcccgtcaacccgctagggtccaccaaatcagcctcttcccctctctccctctctcctttttctcaagatcaaaagcagtgatgcgcaacctctttaagagcaagtcgccttcgaatcggacaagtcaccattctatgcgcagcgccgaacagttggcccaccccgcgtttactccaccggaccccaacgcacccaacacggagtctgaccggcgcctttcacaattcgagtactctggttctgtacagaatcagcctcagggtttgaatcggtcgcaaagtcagcgtcaaaaacctttacgtgaccgaccgaccgtcaacgtcaccgtccccgacgactcgcgcaaaaagggccgtgtcgagcgcagcgtctctgtcaagggcaaaccaatctcacaacctacctcacctggaactttacatccagagaccttggacgagtccgacgaatttccgccacatctccggcattcctacacggagaatccctcacctgtggcgccgcaatctctcgcgtaccaaccgaaataccagggtcaacgagctccccgaccttcccatcctgctcacgtccaagacaaccccgagtggtcacagaaacctgtgcagcctgtgcaaccgctttataccaaactccagcgatccaacaccgactcaacccttgatcagtactcccgaccgtcgcccaccgatatccccgaatcaccacgatacacggaacatcttcatcggggacaggctttctctgcccaggatccggtattgaatactcggcccccatcccagcagactcacgagccgctttccccgttgcagtcccgttaccctgacgccatgcagtcttccgcgcaggcatcaaaccagggtttttatccgttggacagacaaaaatccgccggttctccgcagcagaaccggagtcggcaggggagtgtgtcaaacaacatgcctgatcccggacggagtacacccaccaaaacacaccgccgggaggagtccggggaagtggacgtgcgggcattgatccagaagcatgatgaactccgtaaggattatgattcggtcttggtttttgataaactaacaatgagcagaggccaagtattccaaggtgaaacgatactactttgagaaagatgcgcaggtgcagcatctccagaacacggtggcgcaccagcgaatggcggtgtcgcgtaccgtacttgacgataatgaatacaccagccgattccagcgcctggacggagcgattaaagacctggcattctccgtgcgcaaagattggcgcagtattccggcgtggctgaatggaatggtcactgacgatgctttgtcggtcggcacgaaagaaatgaccccggtcggacgggcagtaatcagccggtggctagtagaggaagtattccagcgatatttccatccgtgcttggatccgacatttagcgtgcagctgaagagtatcgaaatgaacctgcgacggcagcgaccgacatcggaagaagaccgcgagaatgcttccgcgagactctcctactggcgtcgcacgaccttcgacggactgggtgattccttagtcggacccgaggcccaagaacgtcgcgttgagctagtggagcatctaatcgtggagctcgctgccttcataggatcccaactgcacgaaatcgcgctgccagggctagaagcaagcgtgcgtatgattatcgagaactccgtcaacatcatcgagaaaatcccgctcgaagctcgcgatgtctgcgtcgattacttcccaccgggcatctccctcgctgagcaatacatgaaggtcgaaggccaactacccgcactgagccacccgcccccgccaccctcggacccagagcagctcgaggagcctgtcgcggcagagggagatacctcatccggctcaaccggagcggtagagagtacttcatcggcacagaaaaagtcgacgaaaaagtccatatttggcgcgttgataagccgcaagcatggcggcgagaacagtcgttcgacgccgccgcctgggccagccgaggacaagagcgagcctgcagaggtagcgccgagcgccccgcgcattcggtttgcagcgttcctggctgttgaagtgcgcggcaaggggcctgcaacggtgctgatcaagtcgcccgtgtggctggtggaataaacgtgatccatcagtgcggccggttagattggcaccattagcagtggttctcgatttaaatggtggagggtgtatatagagaccggtcggagctgtcgcatggtgacgaagcttatgacttgttatgtcctttgatatcccaaggcgtttcagttgtccagcggcggtttgcactttgcagtggtcgattttcttcttttcttttctttgcctgacgattgcctgacgactagaatccctgattctgctatgattgtgcttttgagtagaaagttttgcaattcgatgtttcttagcggcattcttcgtagctaaatattcattccattactttcagtccatatccgcatcaatactcaataccatataccttactcattaaatcatcctacaacggcggcggcgccagatccaacccctcaacctcgaatttaaacgcatcactccgtgaataactcccagcaacatcgagatcgagccgtccacgctcgcaatcatccaagtcaatgcatgcgatagctaaaccatcacccgccgccacagcaggactagactccgtagcggacgtgccaggcgcggaatccgtcaccgcagcatcgctactatccggcacgtcatccgtgcagacttcccacagcggaccggcaagaacgtctccaagcggcgaaacaatacaacttccaccccgacagacataatccaagaccgagtctgacggatccagggatgactgcttagtattcgtcgcgggaccctccgaccgactctgggcctgatcctgggcctcgccgtgagtctgcggccagacaatctcatgcggaccctcagcagcgacggacattttcatctctggatcgtgcgatttacccgaactagattctggaattccatcctggcttgcaccggtaatccactccggcagctcggagctacgcacgcactggttcgccgagagcacgaagcagcggccttctatgccgatggtgcgcatgagcgggagccaggtactgcgggcgtcggctgtgggagcgagatagatattcacgttctgggaatatagactctgacgcaggaggggcatgtagctctcccagcagattgcagaggctatggttagtgggataccgtttagggttgttgtgacagcgcggagagtcgagggcgagccctgagcccaaatcatgcgttcagcagccgtctaccaggtcagtatacataccgaatgatagcgccagagaagaagaaaaagaaagaaaagtccataccggcataaccttcctcctcttccccagaatacctctaacaggatcaacataaacaacagcacaatacaaactccctcccgctctctccaccaatccagtaacgacgaaaactcccgtctccctcgcaacacgctccagaaactccctcgtcccatccccgcggaacctcttaccctctgcaatctccagcctgcgagcaatccagtcagccccggccccagtcggtgtatcgcctagatcaacagcggccttgaaatacacgaggaattggtcccggccgcgcgggtgtcgacttcccaccgcagacccgaacgaacatgtccgcgggtatccgcctagataggcttcagggaagaggaggaggtggacgccgcggcgggcggcgagggtgcttgttcgctcgagggcgcgcagggtttcggatagggaggtttgggtgcaggattgggcgactgctactgtgagagagggcattttggattgatgttgggtttaggttactattggagaaaggagaaggggaaaaggggaattgagttgacaatgacggaatgggctcgaggaaaccttggatgcttgaagcttggctgggagtacccgtgtagtatatattgaggttgaatggggatatagagtgtgttatgtagactttgatatcagtaggtggacaggaagtccaaagaggcttcagactatcggatgaagtaactgtgaaatgtgattgtttgcttttaaaaagcctataaagtctgcactttcttcctcttcctctcttaatacttcctcattatactttcacctatacacttataccaacgagctttgaagaaatgtcgacctgccacataagaaagtgacggtggtttgatgaagcaatatccgagagagatattctttcatatatccaagtatctatgatatagcgaaaaagaagtaacgttacccccatctgacatttatcttctctactgacccaacttgattctccaaaggggtctatatggcgttgttccttggacgagctcggcaatgaggcacccgtctacctcttgtgaattctcccttcttcctacctatatacatgcctcgattctcagggatgaaccttatttacgggacgtgttacccacaagtcgttgaacgagtacaatcatgcaaaccgcgcgcatgcatgccacgaccaacgggcttcgatgaagaggaccaaggttattggaaagcccacagagctacgctactcccagcaccgaacaacgagcagctatttggttggggtttccatccataatcaacgagagaagtcgtttcgaacatgttgctccgaagctttctttctacagcaccttcaaaacctcgactgcgttgttctcagtcaaagccattttattctctcggtgctatttcggataacatcagtgtcaggatgtgctctggagtttggttttgtcagaatattgttcgcggcatgacatatctatccaaaggctgcgatggcaaatacgactgtaaccatagttggcttgtgggatggaagaattccttccgtcgtctataacattcagtttgatcttcctcaaggccctattgtggctcgacctctgaggcatgagatactatcgattgtaacggttttaattacaaatcaagacataagaaaaaaagttgtgtatgaacagtagggtataatcgaaacaaaaagaaagtagtcataaccgtatagaacgctgtacaaaaatagaacttttcttgttagccaccatgattaggggtattggtcggcgattaacaaatgaacctggacgaaaccatccacatctcgtattcctcagtggctggctcgcagcgtgctcagcctttccgagtactcaggaggggcaaggcccacgtcaaccacctcactgcgagtatggttggaaaaatcggtaggagaagtcacattgcgtgggtggaagaactcctctagttcttgctgtgtgacagtgacaccgagtgcagccttgatggattcagcgtgcttggcttggctcgtgaactgcaccgggaggcggagggagattgtcggtgtcatgaggttggctgcgggggtgtggtatgtcaaggagagctcgagggcgtagatgcgggacatcagacaggaatggaaagtcgggacaaaagcttttgactcgggcagggtgacagggaccacgactgatgcggtgtagtaagtgtccccggtgaatgctgaggacgggcccgttgatgaatcagatgacgatgagtcggtggagtcgcggcgcatcgagttggctgctgatgattgctttgtccactgggcggattcgacacacatggtcaacagaggcacgctttctgtgtagaggccgcatccgatatgggcgaagggcatgccggttgaggaagggaagtcatcccatggggccgcactgaagaatgtgctgacgcgaagtttgctggtcattgttccaagtgcgggaggcttctcgtccccgattggatcgaatcgcaggtttaccgtggccacagtgctcactgtatcacttggctcaccgtttggaggaagcaattgaacggctttgggctgggaggatgaagcaacgatgtgtcctaatttgcctcgcaatgttccgcgcttgacgctcttctctttgcgtgtgcagaaagatgggttcgccgaggtttcaactgggggttcttcttcgacaattggaatgatacggatcttcttggcaatggcggcgatagccacgaatccagggccggtgagttgtttctgaagaacagaggcccgaaccgtgtagccaatctgggacatgttgggtgccatatcatctagcagtgtcttgccattgctggcaaggatgggatcacccaatgttggcggcagcatagtgtgggatcgttgaatgtgagcattcttcttggtgtgggtgcagacctggggcaacaggtggtccgggacgacgaatgtgaaggggtattcatatgtccggccactctctagcactcgcggagtcggatattccatttcatcaataggctggcgcaacttaaggaacatctgttgtgaccccgtccggccggggcatgatgcccgttctaccgtagttcgagatacacctgttctcaaattaacattgctcacaggccgggcttcaataggacttaccttcaaacaggatctcaatctcatcaaatcgggtctcatgctcaacggtgacggttatggtgccatcaatactctctgcggtggtataagagttgacatgtcctggcttttgtcccgcaagatatatctcgattttaggctttgagcgtctagtccaggcatctaacctgtctgagccagagctgatgattgaagtggccgttgacattgttccacggaaaaagcaaagagaatatgaagcctcgtcccacggagaaatgcaggaacaatataaccgacacgtcaaagttaagacaagatggaatatcaaaaagaaaggaggtagaatagagatcagatcgaattgttcttaaggaaaaataaaggaaaaaattagtaaacggtggagccgttgacaaccgcaatggagtcagacaaaccaagtgtggaggagccgtgacaagcaatgtgagcaaggtttcagattgcctcatcgcatatccctcaaggttcttataaatcaggttggggtgtgactcacgagtcatctatagggcgcagctaccatgatatcaaatcacgaccataacctacttggaacgcccccaaatccaaaaaacgagcgatcgtatacacttcagtataaggaaggccgagccatggagtgatcggaggggagagagtgattggtcggatgcgaggatccgttctcgcccatgcacgcccttgggttgacattccgcttggccaaggagcatagaacaacgagaggtcaattcaaggtcgcacatgatattcaggtggatttccaactctaaagaccctatctctagaaaaacgcccttcttcttttcccgatcgttcagatccgatcttccaacctaaaacagccagtcaacgtccaagtacatcagaagtacggagtaacagagtacaaactcaagggggagaagtggagtgcgccttactaacgacatgcacgccctttgactccacccacattctcgaagggcgcccgagctcctctgctgtgctcgtgaaatggccaatcattgtgtgtcgtggaactctgtttatcagaatgccgatttccaagcaatatcccgtggattcgcatttgtaacactctccagtcatatgtgaggaccttcaggttttctagacatgaggtctagtataaactcttcccgcggaaaagagaatatggaacctgggcctagctccggccccagagatttccggccatagccgagcttttttgcgcgccgagcttgttttttcttgttctcacggagtgtcggagtgtcggagtaaacaaaaagatggagtctcggatggtgcaatgcgatctttcggtgtgcaaagtcatggggaggccgatgatcaggtgattcctatgcacgtgtttatatgggaaagtcgtgcttttcgagttctacagctttgcaaatatttcaagagctcaagataatcggagtattaagctacgtatatacaccaaaactggaataaaaaagatttagaataaattgtttcattcagtcactaggataagatgacatttacaagcatgtcccaactgataaattacgacgcagacccgtggtgcatttcggatcaaatcgtactcaaaaatcgtcgacgcgctttcacgcttcttctcgtctcgtacaagctagcacaaaaaagtgaccagctgcatccagctcaagattaaccgacgggaaacggcagaccgagcgaggcaagagacatcataaaagtctacatggctaaagatagccaggggaaaggaaggggaaaggaggtctatgtagtgcaacgtcgaaacaatcagtttcacttgaaaattagtcgtggttcaaatctgcataatcatcatgcattaagaaagaggtaggtatctgaagcccgtagataggacagcaaggaacgccagcagacgccgcaaccaacccgaaatcaatacgccacccgtgttcgcatatcctgggaggtgttagtaaaacgccaaatacacactggggaacttctgcaacttaccgaaatcttgcgctcaatctcccgaacagatcgatcaagctcacccgcaatcatcaacttggtatcattaggcagcagaagatacatttcgcaaagatctccgtcaataacgcccttcacaggggcatagtagctgcggtacatcaaatggtctcgtccagccagagggggttgctgggaagccagctgggtctccagaagctggaaaaagtcgacatcctcacggctgacaaaaggaacaaacattccaattgtgccttggagaccagtccagacaataatgtcacgacctccagcgactaactgagtcttgtggatactagtgggaatatcctgggcatagaagtggatcatcaactcgagacggtggggggttccatggagataacccttttcgtggatgaggtgcgccccagatccatcttcgtcagactcttcggaggccttgctagggcaacggaccagccacaggtttccgaacttgtcaccaccagcagtcgtctcgtaatccaccatggttgtactcgaggtccagcgtgcgatggaatcgtccgcgaaggggatcaagacattgtcctggtacttgtagacaacgtaggtgacactctcacggacgtcgctgacaatgattcggctgccttgtgtctgcagacccacaatggtcttgggtaccacgggtgcttgacatttccgtaggagttgcttcatgccaaggtcgtacacacgaagaatggggccgacgcctgccagaagacgcccttggaagccgagaagagcaagaggaggctcatcaacttgagtcttgtgaatgaactccaattcccgaccatcctcctggaatcgatagatatgaatgaaaccacaagaggacgagggagggctgactatcatatccttggcagttcccacaaccaagaaagtttcatcgtcttgactagagaaggatacagcggcaagactgactgctgcctcgttgtcctcaaggtcaagagtgaagatcacagatttggtggtaaccgggtccacaatttggatgcatgaagcccagtggccagtggctcggggatatccgaagtcaactggaggaaggtccgcaacctcgccattctgagcttgggaatcatcaatcagtctctgacgggtagcaggagagaggacattgttgtcggcttcaatgacgtagaagaggggttggtcggggtgcttcacaaagcgtcggggagtgtaagagagagggatggagtcttggagcatattgttgtccaatttctccacagtgaagatcctattttcggttagtaccagtccagaagaatctgcagtctcaacatggtataagagaaggttgatctcagaaggaacaattggaatttttcttttaaagtttcatccacatagaagttcggattgattttctcatcatagaatcaaggggatgggggaattggggggattttggatgaacataccgtagactgcggccctgaattccgatcatgccctccacacactgctcactggagaaattccatccccactctagcccaacatagtccaagggtgtgagcataaaactcttggtttggacatcggagtatcccagccagggacgggtgctgagcgccagcacagctgtttggcccttgaccgatacctgggatagtttcacaggtttggcaccgatgaagcgagttctggtatccgagagctcaccggttacctcgtccaaaacagtacgaaggtagacacctgagtaaagaccaatgtggagataaagagtcgtgcctcccgagctcgaatcagccatggccataatttgcaaggcagatggtgcagatgtcaaagcttgaactgatttgctctcgagtgttgagtctggatcgaggctgagaatgcggacggtggagtcatcacatccaacggccaggaaggagctgcgcatgcgaccctctggtacctctcccatactcagggaggtcacggtaccagacatctgtcgtcgctcatcatactctgccaatgtcccgtccgcgtccatctcaaagtagacaatttcacctgagctgagtgccactgcaacttgacgttcattggttgctgctgcaacgatggaccgatgctgcggaacgggccattcattgactcgctgatctgcgaggatgtgacgaatgcctcgagggtgaacttggactaaagaatcctcgccgatttgttgcactgccagagtaggggccgaagaaaggaatccagtgtctgaaacttcttcgacaatttcgccgatgctcaggacgagggtgccgttggcaaaagaaagaatgatgtatgtgtgaaactcatcggctcgggttaacttggttgtccatacagccgaaggaacttgctgaaggtccgactccacgatctcagaaaccttaagtgcgtgcttcaaggtccggaatgtgctgcgggccccagagccacagattgtgtagatttgaggggcatcatcctcactcaaattgaggattttactgtcaatcagagggctcaacgagttcatgctttccatgaggttgacattttcagcgcctcggggacggaagtagattggcgcggaagacacagagtgatcagccgagaatgagtcgctggaaaagactgcctcgttgggatcatcaccaagcttctcgaattggtagaaattgtgatttccagattcactggcggcatagaggaaaccgcttttcagaatcagcagattggttgatacaggaatcgtatcaaagtatttgatcgtcagtctcttcacttctccagtaggtttgccctgcttgtcttcgaccatttccaggttcaacttgaacagatcaccatcctcggtttggagaaggaagaagaaagcacctctcatcttgtgcatgactccagagacaatcgagcgcttgcgctcggggttttcggtgggtccacgacgtcgagggatagggacgcggaacgcaccctgattggagtggcggtaggtaatgttatcctccgcgcacaccaagacaccgcttgggccatcatcgcctccaggtacctggaacagcatggatgctgtgcgatcaacagggtcagaccacttgcgaacaacgtgattcagaccgaggtcaagttcgtagtacaccaaaaccttctcgagttcttcgtacgcttcaccagtaggatcctggtcagattccgagtagtccacctcaagagcagcgaaaacggggttgtcataaccgacgtccaagcagatcatggcaaaaaccaaggtctggggcttgttggcttcgagcggtgaggagatggtaagctctgcctgcgagtttcggttgagaacatagaccagcttattcttttccacggaagcaatcaggcacgcacgtccctttggatccaccgcgaggtattggcccggcacgacgcgacgaaccccggattttccgaaggtctccatatgaatgcgattgaagcggttctgggagggaacatattcaatgattgtgatgcgacccgagtccgagccgacgatgatgtaatctatgagaatcagcaaagtccgttgataactaatcgttacgagtatcaacgtcgctgtccagggcaggtctcaaccctctttcaaggggagacttcgtaggagtaccgtgctgcccaggaagcttggagaatcactaagttgtactcgtagaggggcagatgaggagcttaaaaagtaaagcgacatacctttgttgcttccggctacgcggaaagctgcgagggagcgaatgatgccaaaaacatcttgagagaaaagaggcgtgatcttgccctgtgccgggtcaggccggtggatggttaatttcgagcctgacgaggtgacgatctgctggtccctagtgcctgcgaattgacctaagatggcctgtgtgatggcagttgggggctggatcgtcagggagtacataaacatgtgcgatgtggtagccatggtgcgcgcgttgaacggtttccccgtaccacacaaaagacgtgaaagctttgtacatgcaattgcaagtcagggggtatgaatattacatcagtcccatccctgctgggtggagataagaaaaagaaacacctcaagatcacttggcacggatagagagaggtgtagccgtgtgatcagactcgaagaggtgaggaagagaaaatattcctggccctgtgggagcttcgactagcgcgatttgcacgtgatccatgtttcgaccgccttccacgctgcgccgattgatgcaaggcagatcgcctccgcataacgggctcactgactcccctctttcttgtttcatctcactttcactgttctcatccatatcaccacagttcatctaatcgggcgtttgatcagcccggcaatagtcttggtgatatacccctcatcattgatctagcttctaataatcacccacttgctctacaatcatcatacatccttcagccatggccgacgagacagctaccacagagcagccccccatcaccttcactgtcaagtcatccaccgatgccaaatacactctcaccctcccgctcactactctggtgtcagatctcaagcagaagctctcaaccccagaaaatgccgatacccccgcagaacgccagcgattgatctactcgggtagggttttgaaggacactgagacactggagacctacaagatcaaggatggccatactattcacctcgtaaagagtgctgcgagcaaccagcagcgccaaaacacagctgctcagcccaactcagcttctgcggccggtggagcaactccagcgatagctggtgtcccaaccaatctagccgctggtactggtaacaacccacttgctggattgactggtgcgagatatgctggattcgcacaacttcccggcgcgggccttttcggccctgatggcggggtaagtgagctattatggcggatggaagctattcagcaatgcctccaacagatagctaacattctttggctacttagatgggtcctcccccagatactgagtcgatgctcaacatgctcgagaatcctcaattccaatcgaccatcaacgaagctctgcaaaaccccgctatgatcgacatgatgatccagcagaatcccatgcttcgcgacatgggacccggagtccggcagatgatggaaagcccagagttccgccgcatgttgaccgatccgagctcgattcgacagatgatgcaaatgcaacgagctatgggaatgggtggcggtggacttggtggcggtgataatgcattccctgccccgggggtaacaaacacgaccgctgagggagccccaggttcagagcaacagaacgcgcaaataaatccatttgggcaggcggctcagaatcctcttggaaacgccaaccctttcggtgccctctttggagctaatccgttcgcaaccccagcccagccttctgccaccccaggcaccacttcacccggcggtgcacaaggtgccgattctacggaccgatcaacatctgctgaggggcagactcctcaggctgctccgaaccccttcgcagctcttctgaacccggctatgttcgccaacgctggacaagctggccagggcggcgcgaacccgttcaatcctcagcaaaatccgttcctacgtgacccggcgctacttgcccaaatgatgcagggaatgggtggacaggacgcacaaggtggggctgccggtgcaaaccctctggctgctctacttggcagtggtggtttcggaggtggtctcggagcaccacagccgcctgcagacacccgcgccccggaggatagatatgccgatcagttgcggcagttgaatgatatgggattctttgagttcgagcggaacattgaagccctgcgtcgcacaggtggcagcgttcagggagcggtggagtacctcctcagccacccatgaatcatgatactttctgggctgctttcttttctttctagcacagccttgcggttacttttttgatgtattcaacttctattgattttgcgaggtgatgaaatgctccctcggtacctatgactttctcattccccttttagcatgcttatcttgtgtgagatccttagctagttttctggatatcacattgttccagggctcagaatagcatgggatcattttctaattgaggtttctgtgatactcccaatttcgtacaagtcttagtctacaaaccttgaatccaaccttggcctatcccagagttagtgtggatgcaggaattatatgaagcggttccggaaagggccctaatgtttccccctgaagaaagggctcgaaatgtctgtgtcctagattgtattatagttcgcatgctcttggtgcctgctagttgagtttccgggcttggtattagggtatgatatatatcagtcagatctagaatgattccaatttttgcaaccgtcccttggcgagctgggatagacgtatcttacaagtcttacaagtgtatattcggatacatgtgaatttgaccatccttttagtgccttcatccatatatgcacccccttcgcccctgggtctgcggtatgttgattaggtaacccggggacacgctggagtaggccagggaagcacgaagctccctattaagcccccacagttgctcgaactcctttctcgacgaacttatatcactcctgtggcactgagtgccgatttcagtcgttacttagctgttcctcggcagattgcgggcgagctgaagcaatccgatggtccttgacaatctactattcaacacccgcttcctacataaagtccaccgtcgaactgtccatcggccatctcgacaaagcatcccttgaacgagatattgcctacaccatagtcatccctgactcacgcgcttcgatctaacctttgcgggtcgacacgccgttacccaccgacgtacaaccctctccatactttgtgtacatgctgggtcgataactacccgttcactccgggtcgaggacaaaacatatctctttgcattattgaatatggcctttggtcaattctgttcccgtcagtgggcactgtgggtgctgctgcttgtgtcctgtaccggcgcattctacatccctggtaagcaccgtggcgcatattggttggactaagcatatgatactcatacttttcctcccaccaggatactcaattacccggtataatgatggcgatccgattcctcttctggtgaacaagattttctccgatcacacccagctgcagtatgcgtatttcgacctgcctttcgtctgtccgccgagcggcaaaacacatggcggctcgccgtttggatccggccaaagcatctcgctcaatattggggaggtactgcgtggcgatcgaatcatgacctccgacttcgaagttgcgatgggaaaggatgttgagtgccggtcgctctgcacccgtgatgttagtcggtcaaatgtgaaatgggcccgtcaactcatcaaggagggatatgtgatcgaatggattgccgataatcttccaggagccacgagctttgtgactgtggatcgaagccgcaagtattacgcttccggattcaagcttggctatcgagatatctctccagtcaccggacagcatcggtactttatcaacaaccacttcacgatcgtcatccgctggcggagcgcaccggaaggagggaaggtgatcgtaggctttgaggtgtacccgaagagtattactgccgaggaccgcctggaaaatggatgccccaaagctgtccacaatagcaacgaaggactggggctgtatatcgcgccgaatctttcgcgaatggaagagaaatattccggactgtcatatatcccagatgatgatgacgaagatgatgacggagccacactgaaggttccctacacctactctgtctacttccgagaggacaccaacgtcgagtgggccaaccgctgggatttatactttaccaatcaggttgaaagttcgataacccattggctggcgatcatcaactcattgacaatttgcaccgtactgggagtgaccgtgttcgtcatctggagccgtacagtgcaaggcgatctcaagggtcgcggcgatggtgcgatggacgatcggaagatgaagggccaatctcgacgccggagtggcaagtctgagaagaaaggcgaggggcttctggatgatagcgcagatgtcgagcgcgatgcagactactcctcagacgatgaggctgtcgaagatacaagtggttggaagcttcttcatggggatgtgttccgtatccccgcctatagtggtcttcttgctcccttggttggatcaggaatgcagttgttattcatggcttcaggcttgctcctgcttagctgcctcggaatcttgaacccaagcttccgtggtggcttcgtcagcgttggcatgggtctgttcgtctttgcgggccttttctcaggttacttctctggaagactttacaagacctttggcggaaccgcttggcgcaagaacacgctcatcgtgcgtatcctactccaattattcatgtgctatgctaatctatagttctagaccgctttgcttttccctggtctggcattctgcctcgtgttgattctgaacttgtttgtctgggcgcaagcatctagtacggcaattcctttcggcactcttattggtctccttgcactttggctgctcatccaagttccgctggtatacatcggcagctgggtcggctatgtgcgtgcgatgccatgggagcaccctctgaagactaatgcgattgcccgccaagtcccaccccagccctggtatctccgcacccctctcgggcctgtggtaactggcgtcgttccatttgcagttctttttattgagctgctattccttttcaagaacctatggcaggacaagtctggttattactatgtcttcggcttcctgagtgctgtctcaaccgtgctgattgtcacggtcgttgaggtgaccgtaatcgcaacatacagccagctttgctccgaggtaagactgttcttggcttggtttctggatcatactgactcccttagaattatcattggtggtggcagagtttcctcaccggcggaagcagcgctttttggatttttgcctactgcatctggtattacatgttcaagctccacatcaccgggttcgtgtcaagcttgctgttcttcagctacagcttcctcgcttgtgctgtgtatggcctgttaactggaaccgttggtttcttggccgcttatgcgttcgtccggcgtgtttataggtaaggtcattccattgaatctgctaggcaagaggctaatcgtgagaattgcagtgctatcaaggtcgactaaaagttgacacagctaccatcctcttcttgaacttcttcaacccagagacttgtctctttaacatctacctctttacgatctgtccgataagcataggtgaagtcatctaccaccatggcgtctagtattctattttctgcattttctggctccgaacttttgagcctttagttcccccgttgttgaacacacaaggcacttctctttccttattttgtgtccgtgccaaagtatacatcagttataatgtattgatatgtcgctcaaatccgaggacaacgttacctagtatgtcgacatccactgtaaatcgaatactgttttgggaagtacgatgccaagcccctaggaaaccaagcgttgctctttcccggaaacccctgactacgatccttcccggatttagctcaaactgtactggcatatgggatcgagctcgtggctataaaacagaacaggtatcccctcacaaggaacgttggaagcaatgtagaagtatggctttcgtctcgggtttcttttcgcctttctccctcaaacacaaattgaacctgatgttgtatttttagttgcaatatggggcagggaacaaacgcaaagccacgggaaggtgggtgccgcggccatccgggtaagccggttggcaaggggtccttgcctttctctttgatagtgtttatcagatgtgatcaaggcatacacaccgcattacactacctgaaatagtatgcacatcataagtctatatcgggtcaaagcatccgtgactccgtgacttgcaaatttgtactccgtacatcaatgtagacgtggccatgtggagcaaatcggacatatagcaagaatcgtgcatataacagctgctaagaaatagcggtgactatgcttcgcctccaaggtacggagtacatatgtacataaatccggggcgatcttagaccactcgccatggcgtgctcggaaagggggattgctcattgtggagctgtgatgtacattgcgttgctctccttttctttccttttgcttcagcaaagtttgaagagatgatagaagaaaaagagaagaacgagaaaaggagtcccgtcggcggtctattccgtcgatatctcgcaccctcaccgcgctcttcttcaatagtgtcaaatcaggcggtttgattgggcgtcaagataagcaagtggatactgaactctaagctcccactctaaccatgttgggatatcctaagagaataaaagactgcaaccattggctgagaagggaatgacacgatcttatggatcccaaggtttgcctagggtcggcttcgggattcactaggctgaaaacagttagcctttacaagatcctgtcacgctggaaacgctgccatggacgtgggctgcccatgccgttatccactccggggtcgagtgcgcgtgggaactgcactgaagctagactgcgtactaaaacgccggcctttgacttgatatgctttgatcggcattattggtttggaggggatgagatcggtggtggttttacatgctcggttggtattgtggtggtattgtgactttccaatgtgaccgacaccaacgcggcccccatagttgtaaagtggcaactcactcggcacttggcccgatgggatttgattacctacaattgataaaaagcactggtcgtgtgactgagattgttagtttgatctgtttattaaaagataacgagaatatccacttgggagagaaagtatgtggtttatatgtcctccgtaggtaaaggtagattatctacttcggtattacgttaccatacaggctcttccgaaatcacaccatcggtgcctcaaatgatcccatcgtccttgcgggggagtacgtcagtaccggatcacatcccctgatctccgttgcaggcgggaactactttgaactaatcgatttgggatgcaattgcaatgtccaggccttttatggagtacaggatggtcgaatctaaagagaatatgatcttcattgggtatcgcaatacattacatgaaaatacatacccttttccgtcttggcctgcatctgtttgctgttttggtccgtcgctctcgaattatctcgtttttgcctctttgggtcttttcttttaaaaatcttttttttcctttgttccccacattctccctcgacttcatatatcactcgctctcccacactttcttccttcttcattcctttctccctcaaattaattccacctcccgccttccgttggccgtctattgaactggatattcaccatggcgaccaagaagcccaacatcctctacatcatggccgaccagatggccgcgcccttgttgtccctgcatgacaagaactcgcccattaagactcctaatctagatcgcctcgccgagggcggtgtagtcttcaactccgcatactgtaactcaccactgtgtgcgccttcgcgatttgtcatggtcagcggccagctgccctccaacattggcgcctacgataatgcggccgaactgcctgcggacaccccgacatatgcgcactatctgcgacgagagggataccacacagccttggccggaaagatgcacttctgtggcccggaccagctccacggatatgaacagcgtttgaccagtgatatttaccctggtgattacggctggtccgtcaattgggatgagcctgtaggtcaacttgcgaacacccggctgtggcaccactgattggaatttaggacatccgtgccgactggtaccacaacatgtcctccgtgatggaggcaggtcccgttgtacgcaccaatcaattggattttgacgaggaagtgatttacaagtcgacccaatacctatacgaccatgttcggcagcgcaccgagcagcctttctgcttgacagtctccatgacccacccgcacgacccgtacgccatgactaaggagttctgggacctgtacaatgatgtggagatcccattgccgaagaatggagctattccccacgaccagcaggatgcgcactcgcagcgcgtgctcaagtgcatcgacttgttcaacaaggagatgcccgacgagcgcatccgtgccgcccgccgcgcctactatgccgcctgcacatacgttgataccaacatcggcaagctgctgcgtgttctcgaaagcaccggtctggacgacgacaccatcattgtcttcactggcgatcacggtgacatgctcggcgagcgcggtctgtggtacaagatgacctggttcgagaattcggcccgcgttcctttcctcgtccactcgcccaagcggttcactccgaagcgcgtgtcggagaacgtttccaccatggatatcctccctacattcgtcgaattagcaggttgcaaactcgtctccgaacttcctctcgacggtgtgtccctcgtgccgtatttgaccggcggcgagggtctccgcactgatactgtctacggcgagtacatgggcgagggcacccaggctcccctcatgatgatccgtcgcggccgctggaagttcatctactcgaccatcgacccacctatgctctacgatctcgtcaacgacccagaggagaggaccaacctcgcagctggcctccccatcccatccagctccacccgcgcagccataatagccaaccagaccaacttatcatctatcaacttaccaacccctgacgacaccccgcacgcatcgccagttcctcagcgtgtcaactcggcagactaccccttcccctcgaacaccccccctcgcactccaagccccgccaagctcccgcctgcagtgcctaaaaccaccgacccgattaaaatcctggcgttcttcctcgaggaaacccacacccgctgggatttggagaagatccatcaggatgtactgcgctcccagcgccgtcgccgtctggtctactccgctctgatccagggtacccagaacgtctgggactacgagccacgcgtcgacccaagtactcagtacgtgcgcaaccagggcaagggtgccctcgacgatgtcgagctcatctcacgctggccccgtattctccagcaagccgctactgccaatgggatgtctgcataatcaccccgatcaggttttctgaatatacccattgactcgacattgaaaatattccattcttgcattctttatctttattcatttctcttgcatttcagcaccatttctattacctttttgcggcattcccggcattctttcatatcgggatccaattcttcttttttcagtgttgatatttctggattctttacatctctcattctcatagtaaggcgcgcgctatacccgggacttattccccaatctgcatcttttcatgtcggttgtggctacgtggattattttgtacatagttgtgctcatggttccccgggttgggtgtcttaccctgtatattgcggctggtttggggtattacatagacaaaatgcaatcagactgtcatttgggcttctgtactggtggtccacgttcttaagccacaatcaccatatatgtaaattgtattccacccagacgtcctctggtaacatcagctgaacgccgatcgctagatctagataccaggagatggccaacatggaggatcaagcggctcggcgcgttgagatattcttttcatacatgagcccaaagtatcatagtaagaactggtcgctctaggacacacctgcttttatagatctcatatcccacaagtctgtagattttagaaaataccccgccatattccgcgttgcactgcttccaaagtacaaagtaaggaccgagaggactaactcccgagaaatagccggttcattttatgtttggatcttgatcctttaacattcgaactaactcatatcaaaaccagtctctcaatgaagtttctctgctatatttcgaataaattgaacatgcccgtcaagatgttagtctttctttatcgcaacctccgcctgacaccggaagaattcatgaagtactacgaagcgcacgtcaaactcgtcaagaagctggcaggcacggatttccccctttcacatcatcgaaattatatcgcccgcaatacagtcgatattcccccggatggctttaccgcgcgcaatgccttcatcccggcgacgatactccgcgggcgacagccagagttcgactttgacgcctacgccgaacttactttcgcagatcaggtttcctaccaggcctttgcggccaagatctatgccccggatgccgctgcccagataactgctgacgaggatgaattttggatcggttgaaggtgggagtcgccttggtaggggaggtgagagttactgtaaaatgaggtactttcttgtcggagctggtgatcggacttgtttgcgatgcatgttggaagtccgatgtgatcatgaggtataccttcggtgtagtatctttcaacatgagggatattctcaagaacctagtatatgcccaatgaaacgtctttcaagtataactccactaacattcctctatctatactcggtcacgtttgactcccaaaattgcaaaaggaccagatgcataaagccaagacatgtgaagaactcccctcttcgatcatgagatgatctcagtggcttgactcctcagcttatcttatggccccttgaaatggcacatgcttcggtcgcatggtctcggtgctacattggcattccatttatccttctcacaggggccgttcctgcccggcaaaccgggtacattgatatgtgtcagactgcatatccttagaccctaatcagaaccttaaaccagtataaaccctcacttggcttgataataccgctcagttacattcattaacacgagttaggacgaggggggtggatgctacaacgtctgaagatagagcttctaccgatttaatttgttccgggctcctgactgtgcatgagtaaagcatttcatatgacaatgtcacccatccccaaaagtctccacgactgattggtggagggattcttagtcccccacgaggacagataagtcgagttgtgacaaagggatcaagcccaatttcagaatgttacacacttgtgtggtgtgccatgctgttggcgtctactatccatgacacggttagtacagggtatatcataatcgggtcttcatagtgtggggaggatgtactgtggcgctgcttaattgggcgccaacctcatattgatcattggattcgccggtggcttgtcttcctgaatgtgacaatgtgcagaatcctattgatccccccgatatcaatagctgaaacgatgtggccctcttggtcaggcaggtcacccttccggtaacagggtactattgactgtttgagctgtggacaaacgggctgagtagacacaattactattgtccggttgctcaatactccgcgggggaagtcatttgtttgtcgacttctactataaatagtgaggtcatttccctgatgctcgaactcaacaaccttcatcacacaacctcgcttggccgagacaccagaaattttgtccacacactccttcatcatgcaatttgtcattcctttccttctaggcctgagctggctcgccaacgctgcctacatccctgccctgaggaccaaaagcactgagattgtatctcgtgatgctggagagtaccactcggtggcatactttgtgaactgggtaagtttagaccatatacagtgtgtcactggatgaaattggggatataaaaacgtcatcatccaatcattcaattatctaaacaggaagccacgctaattaaactgttcaggccatctacggtcgtaacttccaaccccaggatctccccgctgagcgactgactcatgtgctttatgcatttgccaaccttcaccctgacacaggcgaggtctacctgtccgacccctgggcagacattgacaagcactatgccaatgattcctggaatgattccggagacaatgtctatggctgtgtcaagcagctgttcttactcaagaagagcaacaagaagctcaaggtccttctgtcgattggaggatggacctattctcccagctttgcaactgcctttgacaccgaggatggacggcagaagtttgctgattctgccacggatctgctgaagaacttgggattcgacggtattgatgttgattatgaggtcagtctacagttgccatttggagatgttgatgcttatcaatactacagtaccctgctaccgatgatcaggcggacaaatttgtcgatgcactccgacgacttcgtgaggtatgtgatttcttgatggatatccatgggtcctggctaatcaaattcaggctttggattcctacggctctagtgacgccggaaactatcatttcctgcttactgccgcatctcctgctggtaagttttatttccgtccttggacaattccaaaataactgacacaagtaggcccactccactaccgtcaggaacgtctgaaagagatggaccagtaccttgatttctggaacctcatggcctacgattactccggtagctgggacacagttgccggtcataacgccaacctccacgcctcgaccgacgacccggccagcacgccatttaacacggaccaagccctcgactattacatcggggaaggcgtagctgcaaacaagattgtgctgggaatgccactgtatggtcgagcgtttaccaataccgacggcccgggaaagccatacaatggcgttggatcaggcacatgggagaatggcatttgggactacaagggcctgcctttgcccgactgtaacgtgacagacttgggtcaaataggtgcaagctactgctacaaccaggacagccgactgttcatcagctacgacacgcccgagattgcgcgcatcaaggcgcagtacatccagtcccgcggactgggcggtggaatgtggtgggagagcagctctgataagactggcgaggacagtttgattacaactgtatgtgacgttcttttgatatatgattcaaccgtttactaacatatacacaggttgtggatacacttggaggtgtcgacgctttggagcagagcagcaatcagctgcagtaccctgactccaagtacgttaacttgaagaacggtttcgattagattatgttcatttggctgtcaatattgcaatattggagatttctcgctgacatatgcattgggacatttaactatggctgttatgtgatggacgatgggaagtgcgcctctcgcttgcatctatctcgcacatttatgaagtggaaatactattaagattgaactttgcttgaattgtatggatcggatgtagtagatctagattgtgttgtgttttgctccccaacatcactctccacaaccattgtacaatacatagtgactaactacaaagtatatgtattctatttctcgggcgagagcaatttatactcaaaaataggaattcatatgcatacgagtataattccctttcagccaatgagagtggcctatagacaatattccgccatcacggcccactgtgatgctataacatcataccagagtgaccgcggggccgcggggttctttttcgattaaaatataacttcgtttctcttgtagaaggaaatagtactttgtattgtttcctagcttctagcccgaaatcaaaatgtcgactcaagtatcagacgagaagcctcgcaaatcgctcatcctcaatgcctttgtggaaatgtgtacgaagcccattcataccacttatggagctcatctctgataatcattacaggcagcgggcatcagtcgccaggactatggcgccaccccgaggacgagtcgtatcgcttcaatgatgtcgaccactggatcgagctggcccaattactcgagtcggccaagttccatggcattttcttcgcagatgttctaggtaaataggtcaactgtggcatgttaggcgagaagtctaacaaatatctctttctaggaggatacgatgtctataaaggacccagaaacctcgaacctgctatcatctccggtgctcagtggccagtgaacgagcccttgtctgttgtcccagcgatggcggcggccacgaagaatattggatttggagtgacggtcaccacaagctacgagcagccatatcatcttgcgagacgactgtctacggtcgatcaccttaccaaaggacggtatgtgaagctagtgccagttttgagatcgagttgctaattaaacctttacagcctgggatggaacgtgagtaacacgctgaactcgaagaacgggttcctcaaaggaatatgtactaacaatcccctcaggttgtaacaggatacctcgactctgccgcccgcaatatgggccaagccgagcagctgcatgtaaagcctcacattccatattcacatatacttacaacccactaacaagaaaccagcacgacgaccgctacctcctcgccgaagaatacatcaaagtaacctacaagctatgggagtcctcctggcgccaagacgctgtcatccgcgaccgcgagcgcggcatctacaccgacccaaccggcgtgcgtcaaatcaaccacgtcggcaaatacttcaacgtgcccgggcctcatctttgccagcctagcccacagcgtacaccggtgatcctgcaagccggcacgtcgaaagcaggcaagactttcgccgcgcagcatgcagaggctatcttcgtggcgggccacagcccctccgtagtagcgaagaacgtcagggagattcgcgagcttgcacagagcgagtacggacgtgatccgcagagtatcaagtttctcgcactcctctgccctgtcctcggcaagaccgaggaggaggccgtggagaagttcaagtattaccgcagtctggggtccattgatggagcgcttgcgctgtttggtggctggaccggcattgatctggataagtatggagatgatgaggagctgcgacatgttgagagtaatgctatccggtatgtgataattctccttttcggcttggcagagactgactcgcgatttctgtagctctgctgtggaaggctggtctaaggccacacctgaagtggctaaatggaccaagactactgtcggccaacacatcaccgtcggagggctgggtgccactcctgtcggcacagctgctcaagttgctgattacatggagcgatgggtaaaagaagccgatgtggatgggtttaacctggtaagttgtgttattgaaacagtctgttgtcgagacaattaataacactattcgcaggcatacgcaatcaagcccggctccttcaaggatatcattgatctccttattcccgagcttcgcaagcgaggcctgttctgggacgactatgccgtgcctaagggaacctaccgtgagaacctatacggacaacccggccagtccggaccccatgcagaccaccctgcttcgaggtaccgatggaatgctggcgtggatgcttctgatgctgtcatcccggagaactgaatgctatacctgacatcatttaagaaattgaattgcaatgaccaacaaataattagaacaatcaatttttagacagactatccgtagattacctgcaaggcccgcacaggacctgttctatggacgccaagaaaatgcagattttgtacacaatcataaccaaagctctaagtcaacatgtcatcgagacgttcaccaaggaccttctcgatctgcttaacccatctacggacctctctctcaacactctcatcctcgtcttccataagctcactgatgtaaggcagcatctctggcagaagtgccagccactcctcacccagttgctccgtaagagcctgttcggtcttgagggctgcgagacgggtgtgggggctgtcgccaccagcgaagcgggcgttgggcgcagaggaggggcggaggtatttcatcagcgcggagttcagctccttgtggttatctgtggagtcggcggcgatggccagttcagtgattgtgggcacgacgtcggcaatgaccatgttcgaggtggtggtgctgtttgcgtggccgagctgggcgatcaaaggaccggaaatgctggcgagatgggaggggctttgccagaattctgcatagatgttagtggccgtaatgagctatattgggcgcagagggaacctaccatcctggtcatgctcgaaggacttgcggagcatacgaagggcagccaaccagagggacttttgggccttggagggacccgtcgtgtttagaacactgacaacgttctccaacacatagctggagtacccggtgacaattgactgaagaagatattagcgagattaatgtatggaaaaattgcgaggtaacatacctggagagtaccaaagaagacctcgagaaacttgtagaaagtcgtgaggcgcgaggtttgatcttgttcgttcttgggagcgccggtagtggcccattcaacaaacttgaggaagatgggccggaacgtgctgtcattcagcttgtagatcatcttgattgtaacgtcattgagtgccacttcggcctcatcaatagcagtcgattcgaagacagccttgtcgccaagagcaatctgttcccggcgaagatcgaacgccttgaagagaatcttcgtaaggacgccgatgttcttcgcaatggccgacttggggtgcttgtcaacagcaatcgtgacaacttccaagagttcgttcacagcaatcgggccagccttgacggcgtgctgccaattccgatcgacggcgccgagagttgcgcccagatccaccttgcgggccatcaaccgcagggactcctggcggctttcatcactgctctcctcgatgtccgcattagcagacttgaaggacaggagaagcatcttgtccagatcgccagccgagatcatgaatggcaggtgagcgaaaagggcagagaagagggtgaagacggcgtcgtggagtcgcgagttctccttgccagggaccagactcaactcgagcaattctaatgaacgcttgagtgtgtccgggagggcaggaatcatggcttgacccagcacctcagccatagaggccaagcacaggatacccatgtagcgaatgcggtcatcggattggccgaggcaagattcactggcaaccactctagcggcagcaatgaccttggacgggtccttacggccgtacttgtcggtgatgcggtcaatgcacgaaacagcagcatgcttgagcagcgtatccggagacgactcgacaatgctaaccagggtgggcaagatgtcgagaacccggatctgcgacaggttgtcacgctcggggttctggcggaggcgagtctcgagcaaacggagaaccttgcgtcgaagttcgtcattgggaccctggagtagaacctcaatggtatccaggaagtcgacgagagacagagtgctaaacagagagccgaggacctcaccacaagcctggctgacgggcttcatactctgcacagcctcgccgatgctcagcacctgggtcagaactcgggagaagcaagcgcgggactgatcagcaaactcgtcgtccgactcaaaggccgtctcaagcttggacttgagagaagagtgcttgaacaagtgagcaagatcacgcaggagatcaacgcagatgctctgggcgtcgcgtccatcgtcactgccaattccaagaagaacctgagagatacctggtttggtcttgagagcatcgctgaccaagttcaagtacttgctgtaggtggtaagctctacgacagttgtagtgtcagagaccagaccagtcatcagagtgagcacatccttgtcggtggagtatcgattagcgagcattgccagaacggcgaacaggaagtcttgtgttcccagcttgctgatcaaggcatggaagagtctcaagcggcgatgggcggggatgtgctcgaaggctgcagtgaaactgagcagtagctcggatgttccggagacaacatccctcttctggttacgcagagactggataagagcaggaacaacttggtcaatggtttggtcaatgaccgaaacagagtagtcatcatccttgcgtagaacggtagtgcccatgaacgtgaagatcggcatgacgctgtggagaaccaactcgggcgcaatgacagacagactacctacgagaagaagagcgccgttctgaacctgcgggctgtcggttgttcggacacaatccaccaccaggtcggccctgatgacggatgtatcgaacttcggcttaacagatcccttagatgtgttcacaatagccaagagacttcccaaagtcaggctgaggagatagctcatgccagactggatctgggacttgaagtgatgaagagccgctagagtctggaacaatccacctgcaagctcaggatgagtttctggggaggagctatccacgatctccaagatgaaagtcatcttgtccatcaaattgctaagctctgcttcgtccttgacagtcatcgcaatcatgttgttctggctagtacgtctccgcttcggtgctggaccaacagactcaacatcggtgatagacacaggaatcttttggacaaattgctgaagaacagcaccggaaagctcgacagtgcgaagaacgtcgcggcagttattcgccagagaagccgcattgaccgatcgcgaaagagagatatcgagcaacttctcggatgcagtcaactgacggtcttcgggaatcttagcccagatgtgtttgatttgaccaaagcaagccgcaacaaaggacgggcgcaaatcaccaccagagctgacattggagaggagaacatcgatggcgtccttgtctttggatgtgacaatagcagcaatcaaattctctgtctcagatgccacgatgcgctccttgccacaaatttcctcgacttccttgtcgctcaagcgacgccaatcctcgagcaccgggagaagctcactggtcagggttgcagtagagaccttctccacgctgtttaccaacttcagcaagctaatcttgggtgcgaacactggcatcttgacaacatgagagcagatgaacgcaaagagactaaggcggagagacttcttgagttcggatgcacccgaagtttcggacaaaacgttgccccgaagagtagcttccaccatcctaccgacatggttagagtcaaggatagactcctccaaccctggaagcaatgcccgctccaaaaccttttgcgaatccttggtggtcagccatgcaacacccgtggattgcttgcccttgccgtagattgagtcgtgagcccatggcttcgagctgtcaccggaaatggtgttctttttgtacaaagatccgataatagccaagatgccagcagtctgacggcgaatccgttctgaaggatcagagagggctacaaacaggaatggcagtagtgcctgagggtcaaagtccgcgggtgccgacgaaagaacagatgatacaacgttcaaagcagcgatctttgttccgatggggtagtggccagcaacgactctgacaaagaaggatagatattgaggtgttttgatcgcctgggacttgcccaagattggcaaattggtgaaaagctcgagattgtcctcggagtccaccgccaaggcgaaaacgcgaaccaggttatcgaattcgatgatagactgtttggagaggaaggagtatgggaacaaggactctttgatcaaagactccaaggctggggtaaacgcgtccacctggggctgatcatccgcatcgatcatatccacatcttcgatggcctgtgccacaactggggcctcgacaacggtctgaaggttgtgctctagcgccgagatgttgagcgaagattcagtcaaaaccttctggaaaataggttgcagagtttcagaccggttgaatccttgaaccagttcagcaagctgtgtctgggcatccaaagacattccgcgggtatcatctgcattggaagctgcttcgagaaccaggctcatagccttggcaatctcattctcaccaagcatcttgcgttcaaagacggaggccagaattgcaaggcgagcattgtcctgcttgtcaagatcagtcaagcaaccggcaatgactccaagcaataattttgatgtctgatattgtggcgcgatttcagaaagttgggcgataggattctcgaggcgcaagatgcccttaaagacccttttggggattgtaacagtaggcttctgctgtgcaaggactgaaagacaaatcagaccagatatctttgtatcttctgtccaagaacccacaacactctccattaggccatcggtaacttcgttcgagaggaaggccttctgtgccagtacaacgcagatcatataggagccaacgatcaattccgaaacattcttcattgtgaaagcgttactgagtaccggcaaaatccgcaaaaggatatcttcatgcttttgcttctcggcctctcttctccccgagcgagcgccatccaacattgttgcgacagcctccgtgacaattccggcccaaaatgcaagtagtgcatggctttgggcctgttgcctacaaactttcaggacgtattcgtttaattcggaaaagaaaggcttgttcgtggctgcgctatgaacaagcgggtgccttggtggattaatgagaccgttcttgtatggaataaggactttgaatgctggcgtaagagtttccggaagaatagagagaaggttcaagaagagcggcgtcgtatgatacggcaaaaacgtcaataatacggcggttgtgttgaactcgtggatcctgtcacataagtcagccaccactcctcacgatctgcacctcccctcacaatttattcttacctgaaccttctaacaagccaatccacagctttcactgcaggactcaactggagcctgccgccaaccagagctaggaaagcttcaaccacagtatccagttctttattctgggctacgttcatctgactgcggtcctccgctttgctctgctcgctgaatatcgtgcgatcaaactccgtaaaccgggggtccaacgagcataactcccggaatccgtcataacaaatatcatagatcgcatcgaagtcttgagtgccggcgacttttgggtcaaaaataagtgattgtgagtgtaacaccctttgcgccttaaggtcaagctcgtgtgccgacttggccgcaatttgcgacagctgcgcggcgagagacgaagccattgtgaagtctcttttggcgggctgttccgcggacttttcttgttatttttgtattggtgctcacacaattgcacagtgacccatatccctaagacttttgagggtagtctttctttttctttgcgaaccgagggcaggttcaaacaatttgaggtaagtcttcagctttgcttgaccaaaagcaaatggttgacttttttttttgccagccatcccgaccgcctatcggagaatgattcttccgggttatcagaccgcggcgcgactcgataaggaagatcgagccaccacgatggactcacctgggtctcaggttagttagcctttacttacatcttagtaaataagaggcacagactgacgaaaataaagggtgtcccgcaattctccagcttccaacctccccctaccgctcctccggcccccgctaccggctcggaccatgaacgtcgccggcgtcgctcgcgccatcgtcgtcgcgcagaccgcaaagagtctccacgctcacgtcgccatgaaccgcgttcggacggttaccgtcaacaggcgacagatgaaaaatttgagaagcgcctgagtggggaaggaattgccgatctaaacgctacaaaagatgagccgaataaaggattcgtcgtcgacagccgcggcgatcgcgacaatacacgttacggcgtggatcgttacgaggtccctgcataccaccgcaatggcaatggttttgtacttgggctccccggccagcgcattgattaccaaacgcgatatgaccaaggccctcttctccttcttcgccccgactcaggctcgtcaacctccgcagtcaagcccctctccgccgaaaccctgtctgctttgtccgccaatcttcccgttcgcctccggtctgatcttaatgccaaccttgctgccgagaactcacatacacaaaatttcatctcaacaacagtcccatctcaatccggcgttgcgacaactgccaacctagatgatgaaccaccgtcttatcgctctatcgagatcccggataaatccgaagaacaagcgactgaggatgatgcgaagaccttcattcgtcttgctgtcgaagctgagattttgaatcgcaatgccaagttgaacagcgcagtggcacaacatcctaatgatattcaagcatggatccgtcttgctgagcatcaagaacttgccgtcaccggcgggacatctggcgatcggtcttcctatcgcgatcatatacaacttgtggcaagagccaagctttatgtgtatgaaagagcgatcaaggccaacgcacaaaacccagaacgcgatcatcttgtgctgggccgtatggaagaaggcgcgaaagtctgggactccacaaaactttcattggaatgggacggagtcctccgccgtcactctgagttcatcaatatatggattgagtatcttgactactgtcagactgacagtcaggattttaactttgacacttgcttcaagacttatgcctactgtttgaagctacattcacgtgtcggcttcgggccgcggaaaactcttatcaggtcatacttgctgctccgtttgaccctgtttcttcgagaatcgggccacgtagagctagctgtcggtatatggcaagcggtgctcgaattcacatgcttccggtcagcacatctaaagggaaagagagaagaggccctagttgagtttgaaaagctctggaaacctgggcacatccggattggggagcctcattggcaaccctggaacagtggacaaacctcccgtccctctatcaacgagcatgtttacacttctgaggcgaataccacagagttgttcccatcctgggtacgtgcagagagagagcggatgttcaaaaatcgcatgccgtcacatgcctttggtgaaactggagagaatgacggtttccgagtagtccttcttgaagatctcacgcagatacttccttatttcttggatttggaagaaagccttggttccctagttgatggcttcttgtatttctgccatttgcctcacttgacaatgcctgcgaatatgcacaccagccggctgtggaccggtgacaatttcgtgcgaaacgaatatatggatgatcctcgaaacacaatcgcggactggatcacttttgagaagtttgcctcaaccacaagccttgcgcctttcgcattccctcatcagaccttcgttcacaccaccgatactcttttcgccgatccaaagctgtggttctctgctttaacgaagtgggctgcaaccacctctcattcttcctgtgtcatcgatcccgactttgtaatcttgactctccatgcccttgtcgatatcttcaaagatagccaattggctgaatacgctattgcagtcactttcgcgtgtgacaacgctctgggcaagaaatacggaaagagactcttgaaggaacgatcatcaaatctgagactttataatgccgttgcgctcatgtattggcggactggcgatcttgatgttgctcacaatgtgtggtccaccgctttgtctatgagccagaattttgacgcccgcgagctcactgactctgcacttctgtggaactcttggatatgggaaatgcttcacgctgggaacaagaatcgtgcttcatacctgttgcaggccatgccttataatcgagtccacttgctatcatacgacacagctgatgaacttgaaatcaatgaaaccacttttcttagggtcaagaaggcaagttctcattcgttgatctcactgaatgctgtcctaaccatccacagtgcttgtttgccgctcagaggaatgccttgaagttcaagaaaatgcaagcatatgtagcttacgtcgactgctatgccatcgccctctatctcatgggcgagcagcttgaagaagttcttgatgtctacaatgacgccgccacttctcttagagtcttacccaggactgatgatgattccagggtgtttggcggagaattgctacaccaagcacgagcacggatcatttaccactatgtggagaagcagagtggtcaattcagacccgctgacattcgtgcgcagctcctggatagcctggaatggtggcctcacaacaccatgttcttgtcgctgttcaaatggaacgacgctcgtttgaatctgagcgatcgaacccgcgatatcttcgacgtcactatcggggcgaaggccagggccgcccggcatctgcaagggcctgccccaatctaccgtgtacccgtcacaactcacctttttagcatctatgctgagatgggtcgccctctcctactcggttcgaccgcgcactccattcgggcagccttcgagcgggcgattggtgatcatggcatactcccgatcgggcggaccccaactcgaaagagtccttttgagctggcgagctcaacctccgcgcggaccagcctcaccatctggaggctgtacattctctacgagctgtacgcggagtacaacgtcggccgcgcccgcgagatcttcttccgggccctgcgctcttgcccctggtcgaaggagctgtacctactcgccttcgagcacttgcgggcggatttgaccgaccgcctgccccccccccccctccaccggccggggnnnnnnnnnnnnnnnnnnnnnnnnnnnnnnnnnnnnnnnnnnnnnnnnnnnnnnnnnnnnnnnnnnnnnnnnnnnnnnnnnnnnnnnnnnnnnnnnnnnnnnnnnnnnnnnnnnnnnnnnnnnnnnnnnnnnnnnnnnnnnnnnnnnnnnnnnnnnncgggcgtatttgcccgcccgcctgccccccctcagtctcaaccggcagggagaggtcagctcgtcggggttcaacgctgcagagcttcgggctttgtacttggagatgctgcgtcgtggactccgtattcactactacttggaggaccctatgggccgagtaggcccagagggggtctgatactggcggctgggcggtggaggaggagaggggagagaagagtggagaatacaagaccatgagcgggtgaagggggtgacctagatgggataaaagtaatatcatccaattcaaaagtaaaaaccccgtgctttgctcgatatccgggggtctagcagcgtagcaacgtagggagtctcgaatcgatcacaactttggtccaaacctcggacactttccacactaaagtcctggatgaacaatctcctcacaactgcagaatcattgtgccactgagcggaggacgcgaggtgggaatttgatttttaccaatcttgcggaccttcatttagtctaggtatgtcaatataaaacagcttctcgtgaacttcatggcaggcaaatgggacaaaattgtagttacaatgggcctactaaataaaggagccaacatatcaatccaaatagagtaaatgccatcgccgttatataatctttctttattagatacaactatgcttcctcaccaaagaaccgattcttaggtctcggtaggccaaagtgctcacgcagtgtcgaaccggtatactctttgcggaaaagacctcttcgctggagttcaggaatcaatctatccgtcacctcttccaggccctgtggcaagaacggaaacgtgcacgtgaaaccatcagaagcttcctcgcgcaaccagatctccatttcatcggcgatatcgcttggcgaaccgaggaatgtcagccctgagtatccaccatatcgttgggcaagctggcggatcgtgagtccctctttcttggctagcttttcaacggactccctgctcgtcttgctcgcattggtctcgggcagatcgtctggcaatagactatccggatcaaggccactgacatccactccaagtgagattgacaaggaagcgatggcactgtcgtaatgcaccagactatccaacttgagtctcttctcctgcgcatcttgcttgctatccccaacgataatcattgccgcgggtaaaatgttcaagagatctctcttccgtccggccttctccactcgccccttgatatccgcatagagtgccttcgcactatcaatatcctttggactgcaaaacacaacctcggcagtctcagccgcaagctgtcgtcctggctcgctttgcccagcctgaacgataactggccatccctggggtggcctggcaatattcaacggccctcgaaccttcaactcatcaccggaatggttcagcacgtgcattttcgcaggatcgaaatattctcccgtctcgacattgcgagtgaaagcatcatcggcaaaactatcccacagcccggtgacgacatcataaaattcgcgggcacgcttatatcgatcaccatgggccagatgctcatcgaagccgaaattatggctcgactctgggtttccggtagtcacgatattccacgctgctcgcccaccactcaggtgatcgagactggcaaatcgccgggcaacatgatacggtgcgtcgtaagtcgtactagcagtagcagcaagaccgatcttctccgtcacggaagagagagcggagagcagagtaaatggctcgaatgaggtgaccgtgtgactgcgcttgagagcttcgacgggcatgttcagcacggcgagatgatcagccatgaagaaggcatcgaacttggcggcctctagcttttgggcgaactgggcaatgtgtttgaaattgaagttggcgtcgggatatgagcccggatagcgccatgcacccgtgtgtagcgagactggccgcatgaaggccgtgaggtgcagctgacggttgggttgcgagtcggtcattgtggagttgatttgggtatcctctaggttggatttttcaatctttccagatgtgattcatacaaataggttaattagaatcgctggggttatatactctgtaccccgcctgttgtggcatttccaagccgatttataagcctcgctcacttggccttgatatggcgtgcttagagctgcgtaactatatatagctgtgtatagttgtccaaccattctgaggtcctcatttatcgcaaatcttatactttgaaaccctctagtcaagaaaatattgaacgaggggtaccctctgttgaaattcaatctgctgtctatgtagaatgacacaataaaaaaatccaaaggaagcaaagaagaagcagaaaacaaggcactcggatgcatggcagatcaaatacctgcgtacatacgtaggagaattctagacctcatacaagccaagcaaagcaagaaaaagaagcaagcaaaaagtcgaaaagacgaactccccttatctgcgtaaacaggcagtggaatttatcgcaaccgaacctaagtggccccggttatctctttgatgtccgcaataagatcctcaatgtgggtgaagttggcagtcagtgtttcctcccgacccgcaaaaggcaagccgactaccacatgatctcttttggtataaaccaaggaaccggagtctccaggacgtgcaaaaagacgtaaatcggtgccgctggctatcacggtatgttccaccgtcggaacagaagttttaattccatcaatcatttcgtgcttgacatgagcctctttgagggagtagtcgccctcggagtacccggagcgttgtcccgaaaggcacagccttaagttgtcgaacttgtcaggtaggggcgatccctggagtacatgccccctgggagtctaatgaacagttagattcagcgtatatagtaaggctttcttccaatagccaaactcacgacgttgctcgacaatccatcatccggtacctcgaccaagccccaatcgcagttgatacggtgtccatttgcaccctgtcttgtcctgagcccggatgccgcccagactctctcgaatcttgggtcaaaatctttgatattgtcaaggaaaccccgctaataggacaattccttctcgttcttcagatatttggttttctccgttggtcgaacattctgtttatgggtaacgagtaccccagagagctggtgagccgatgtgtcgattttctcaatctcctcttctagcgcggttctcttctctcggatcgcacgagagctggggtgatagactgtcaaattgcgtgaacttgtttcattggggccgatgccgaattcgggccatcgtctgattatcctgatcgtcgcccgcggcttaccctcctccgttcggttgatgacatggaagcatgttacggcaacaactttctgtgtgccgtcgggcgatgcggaatatattaaagtcaaggccaatgtttaagctggagctccttggtaattcttgcgtgcacttgaagatatatcaaaggataggggtgttccgactccaaaggccaaaattgaaatgggaagtcgggatttgggatcgtgatttcgaaattgatgtgaccaagctggttttcggatagattttgctagatttggcgacaggcttgtacccaagtgtcgctaaatgtgtcacgaattgcagtgatgatcaaagtcggcgcgggttccttaacctttaatatttgtattgacattttttgatcttgatagatgttgcattgactttgtactgaccaagaaccgaaagaatcattttatgaacgctgatggtttcgaaaactgtccataaaggggacttgccgtccagattgaaaattgtcacgggtagggaacagagatatggccctccagcgcgattttgctcattgatgaatccatctgaatcgacctgccactggcccgggtcgtgaatactatcgcagctggtccgaagacgctggccatctcgaagaggagaggcgtatgctgctaggacttgggagcttctcctcctcctcctctgattcagcgtcatgctgagacgatttatcaaagctttcgatggaggacgattcggatttggcaccagaggagctattcgaaaccgcagaagagtacccatcagaggagtcaccagggaacgtgttgagcatggcgctagggtctttctggctagagctgggggtatgaaatgggtcgttctcagaggggctgtcacacaggatgccagtttgaacttcactaccacggtcatactgagcagacatgtctaataaagtgctagtgctgacttcgagattcttctgggcaggcgggccaaacgaatccccttctctcgatttaggttgtatcgcaatagaagtctcagttgtgtgccactgcacaggcacgctggtttcgatgtcacagttcccctcggcagacgggtcaggcatgatgacagtgtcagtgtcagtgtcagtgttaaactgagcaggtatatctgacgaagcgctagctttttcttgagtaggcagttcaagcaactctatgggtagaggcttgaggctcatctctgtagaaatctcagggatgattatttgaaggtacaaatgataaaagtgaagtgatgtagaagagaaagaaagtggagtgggtggagaagatatgcggctcgacggccttggtaaaccttaaatttggatacacagggtcacgtgatgaactatttgtctcacaggggcatcctcatccacaacacacccaaagcgtctcattattagacccacaattttcccaatagcctgatactcatgtgatcaagtgctacaaactttcctaggaggaggtagtatcaggaccatcgcatttgattgaacatgtaccgacacctatccacgcgtgtttggtgctacgttcgtatgatacaaggcccaaagcaatattgccagtcaatcacgaaacattcacgcatgctctattctcactcaggtaggtatgcctgcctaaacgtgatttaacattcactcattcgtatcagactggaattctgacgatgaattttataaattcacgcgtactcgctttcttgtagacgaggcggaaaaccttcgaaggcgagagatcaaattcgacttgaataggctcgcaagtgttgcggcggactcgatcggcgctgctcaatgcatttccatcatcaagtaccccgacggtatgttcaacaaaacattccttatgacgatggaagatggccgagaagtcgtagctaaggtgcctaaccctaatgctggtgttccccactttaccatggccagtgaatttgccacgacggacttcgtaggtttatttgaaactcggtcgacgccaaatcttgctaatgcgactggattggggggctcgcaaaaatcctcaacacaccagcacgtcatgtccaggtatggaactcgcaagcaaagtcacatcctgttggggctgaatttattatcatggctaaaattgagggtatcccgctgtcccaagtctggagcacgatgcaagtacactagaggcttaaagttattcttgccatgacaagtctgcgaaagcaatggctcagcgtttcattctcacattacggtagcttgtactacgctagagacgtgcagttcccagcaggcaaccactatgtcaaggatggcatggccgtcaaagattcagagtttgctattggccccgctactggtcgggattggtttgatgcgggcagatcaattttggatattgaaagaagaccatgtacgtcagagtctgtattttctttctctcagctgctgacgagttcgtaggggcttctccaacgcagtacctgcaagccgtcggaacgcgggagattaaagcaatccaatttctgaaaccacccaaacagactgccttattctgtggcccaaagctccaccaaccggacgcagaaaagaagcttaccgcgttagcatggtaccaaaagatcgtcgatgccattatcccaaaggacacctccattaccaacccatatctctggcatgatgatttgcatgatgacaacatcttcgtagacccagacaaccctgaaaggattacgggtatcattgactggcagccttgccgcatctcacccctcatcagctataaccccaatccagctttcctcgactgggatggccttgagccagaaacgctcgatctagcaccaagaccgacactcgctaggctttcccccgacgaacggtccgcggctatgcacgagtatacagttcaaaatatgttcattggatggcgaaatctcatgcgtgctaagaatccagacttatatcgggtagtcgaattccgaaagacggcagcgttcggactgatatttctcgcccaccgcatgttcgaatacggtgaaccgcacttcctatcgcttctagtcgatttgaaggacatgtgggcggacttacccggcgtcattagcgacattccattcccatttgagttttcggaaacggacttggagcgcatcaagctggactgcgataaaagtacggagtaattgtcgtagtggcctgattcgtcgcccgtagtccgctgcagggttaccataagttataacttagggcaggcttcgatgcgcagtgttgatataggtcataataaatgccatggtctctatttattgtctagagagtgctatatcggttctgtttcttattggatattattcaaagaacattgtcaagtctattgccatatattcctaccacccagcattcccaccgtatccacgtatattgattgcttctcgccgctcgattcattcatactctcaagatgtaaaatccgtttagaagagctaacatagagagttcatgaaatcatagaaaagtataacaaaaagagagattcgtgattcgtgtcatatatgatagaacaaaaacaagaaaaagcaaaggggcaccagaaacaagactagaagtgttccttccagaatttgaaccggacatccctggttgatgaatatttggccgcatcgctaatctgcatggcagcagtattaggaccacagaaataaacaccaatttcggtggtagcagcgctctgcagacccatcatgtaggactggtccagcaagccaagccgcatagccgtgaagagtcgcttgaagtccggacgaccaaagttcgtccgactttttagctcggtgagagggtcaagggcctgcccgacagagttgaggtagatattggcagcggtatcggcgtcgagacgctgtgtgaggtaggtgtggatacgcaagaactcggtgcttccctcgctagcagcggtgttggcggattgggcttcgagggaagatagcagagcttggaaccactcaaatgacgaggtatccttacagacccagataaactcaacacgtcgcagtcggcgaggagggtttggacttgagcggagatgccaaatgttcttgagaatagatgcccagggtgtgacgccgatgccggtgccgatgagcacggcgatttcgttgtcgaacacgtcttctgcgggtgcaccatatggtccatcgatgcggatggagggcatggtctgtccgttctgcagggcaacttcgtacatgccgttgggatcgagaccttcaaggtctttggcttgggcgggaccgcaaccgagtgcatctccaagtgctcgggtgaaatctccgacttgacggacgtgaatgctgagatatggatcaaagggacaggaggtaatggtgaatggatgccattgggtgctggaaacatgaggcacttgaaggaataaccattgtcctgctttgtacttcatgcttggtttgtggaactggatctccatggcggctgaggttcttttgttagctgaggtcaattcaacatttgcgagagaagatcataccataaggatggcgaatgacttttgtgatgactgtcacgcgccgggatcggatctccctgtacagtcgttcgaagagatacaaagttccgatgaccaactcccatctccatccttcatagccaagacaatgattccagaactgtttccctgcgaaaggagagatagggctcgcggtatcccggacaaagcacccagtggagtgggtgtagagagctagcatgaacggaataaaaaggtgatgcgcataccagaaggtttcatatgcttgttggcggatgcggtgatgtgcggttgtatacatgagcatcatgcacaagagcatgacatggccagtgataccacctgcgcgagcaaaatggatctccactgcaagttctgggcggagttgcctcttttcgatgtggtagaagctacttagtgtcagtaaagtacccgcgacaagctgtatgaggaagcagcctacttgacatagtgagcagcagtgtgaatagctgtgaatactagtatagaataagctatttgccgatggaaccacgccgattcatctagtggtagccatttgatctgtggtctgagccatcggaggacgttccgacacataggaaataggattaaagtgcaatcgatggaaagaacgagacctgcacctcgcgatatccagactgaatagccaagtgtatttagtgacgccaactttggatttgatgcctgcaggtacctataagaatgtcagcaacaagatctagaagtagaacatcagaatacataccatcctgcagcaaagatcccaatatgtacaccccaaaagaacaaatggaacaagaccttcgaaacggtcaagttcgccctcttccaccaggaatcttgagctgcggccattctttctctgtgcttttgagaatgtcgaccagcgacaagtatttaggcaataaactaatcaaaggagtgacgggtccagacggttgaccagcaacccggtaatatacactgaaattctgtcgaaagcgaaatctcctggctcccttttgtggcaagactccagtgtcaattttgaccggtcggtgctttcagagttcgtcaacggcgttgtttctccatgaatttggcgtaaatcaagatttcctggggtaattttcgcttcgaagttgaagagcggatttgaaaaaaaatccaaatactgttgaacgcctcgcacaaggaaaagtacgctcgaaacttgtgatagtactcaatcaagatgtatagaaataggatgtgagttgtgcgccttgtcgcgagcgctcttgccgggggattcccctgcacgtgtcctctcgaataaaagaggttattgacacacttgagataaatatgaaatcgatttgattcaagctggtccagacatggttgacgtcaatagatggaataagggcaagatcggagatgggttggaggttcagagaatcccagtgttgtggttttagctgcagggatggggggcagccgatctataattacatcgcttctggcgggcaatactccgtttaaccgactacgtacacgagtctacaatgtctgtgcttttagaattctcctatgaatgagtggtaggaagaccaagagaggaagtccagaggctagaatcttgatcgcttgaaaatcctcgttagtttttgcctgttctctcccgactgctgtcttggctgattcttccaagcctttcaaaagccctgcttttgatcctgggcctgggattttattaatactctgagaagtgtgctatttttaatgaccgttcgtagcaggtacaccaatcatgaaacgaagtttatacgccctagagtccgaccaccgtgccatgttccccgcgaagaagcgagtctagtgggaaaaaggaagcaccctgttcgaccaatcctatccaattcggcagttttccctgatcataacaggcttgaacaggtgcaagctaaatcggtcgccgaagttcaaagagattaatggcccgggggtggcagagaggctggtgactgggcaacgtcaaactaggccagggaaagaaggttgctaagaggttggcctatcagaggcctcctgcaagcgctgttctctcgtcacacggagccccgagggtcgcccagcgtcggtgaaaaggcaaaaagcctgccattctgttcaggatccatacggcggagagaatagaagtttcgccaaatatagatcagtgatgatttgaactatattgcgtgttttccataaactataccttttttccgataaaattctccacttggcactgcaagttaaatcaggcacgggctgactctgcagaagatgcagaaagacggtgtgttgcactgaattggaatcagggctactgtggtcatctgatctggatgttccaaacttgtctctacaacaaaactgagaccatgcagacaaccccggacaatccaaaaaacacaggcctcggttcaaatccccaggaataataaaaatacaattcgaatgtccatgagacttgaaaatgaaagcccctgtgcgtgccatgcatgcacctgcagttcatcacgccaagcccaagcgctctggcctgtgatttgccgacatccacttcgcgatccgctccgtcacatcctccgctcgccaatcacacagacttcaacaagctcaggaagaggggtgtcaaggattcggggacctttcggccagtgattggtctacgatgcttgtatctgtgcggatcacgctttaatcctatccttcttgcatgtgtcccaaccccatgcagctcgtcaccttttggcgctcgaccatcacatcctggcaaagtgttccgagtttgtttgagttatcagaggggtgatttgtctaagtatagactcttatacctaaccccccgcctgcacgcatgtcactcggaacatactttttttttcttccccatacgaactacggtaccacgataagcccttgcaatatatccgctctccatgtgctcggattatccaactcaataaacatctctatgtcttgctggatcgtatgatgaagtgattctctcacagaatctgccgcaactatttggggtttgcgacatctgtcgcccaagattagccttgcactttgtcacacaagtgactttatttcctccgaggtcttcgctagctaaagcttttccacgcacaacaatacagttcccatagttcaacaaaatgggcaggctcatcaagaaccactgggggcgcttaatcatcctcaccgcagcagcttgtacgttgctatctaaacccccaagtcgaagccggcactgacatattcaaacagaccaagtcgccagcgctatcgagggctttatctggcccaaggtattctgggactttatctccaggaacctcgatgcggccgtcgccccagtacccgttcttcaaatcctaaatctcgtcatgggcctcgtgggcatagcctgggaatggcctctcaagccatttgctggctcactaccgcaccgcagcattgaaatccgtctcatcatataccccctcaacgccctcctcgcggcgcttctctatcaaggcaccgaccctgcaatatattatttgattggcatcggtgtctatttctgggcctacagtgaaggcgaggtatgttgcgcatatttttgacataggttgttcttatgctaacgagtggatataggtcgtctgcccggagccttggaccttgccgaaacgacatggactatttaaagcataacattggttcagtctggtgcattgagtgtagcagacacatatcatttagatatcctaatacataatgaatttgatgacttgaaagagaagcatggcttgtatcattaatctccatcatcgtcatagagaatgcgtggggaatattcctcctgcagaattctcaacttgcatagacctaaattatcattttctccaattgacagtcataaaactgttcacttctcatattctcatcatacgttgatgccttgtcaaggaggcataaacacgtggacgacccacctggcacgtgataccctattcaaactccaagaaaaacgtcatcttgacaataatactttcatgaaagctcaagaagatccagaagatacattataaatgccttgtgcatcgtttatatgtcatggacgactttagggctgcttggaacccgagaactaaccaaatctgactgacaccaaacaagatggctccgtctacagaaatccaatccaaagtcgaggaagacgagctcgcccttgaaactgtcgaggatgtcccagtcaacaaactcaccagcttcaatggccgactgcagcaatacctgcatagcgggaccgcagcgcacgaagccccaactgcctctcggggtactatatcgcaacgccgcataaacaccaagaccgaatataaaccagacattaccgaacgtcaagcaaaagccacaatatccagcccaaggcgcaagagaacagcgtcagcaacctcatgcaccacccgctcaaagtcgaccacaatagccacgcctccatccccaatcccacctcgccaaagcccaaacaaacgcaagcgcagcacagcaaatccccaaaccccacccatacccgcaatcgccggcccttcagcgacagaatccctccttcgcgacacaatccccccaaacctgatcctcctactcgtaggcgtgaatcccggaataatgaccggcgtaacggggtacgcctacgcgcatccgtccaacctattctggaaactgctctattcatcagggataacaagtgtccgccacatacccgccgatacatacaagcttccggcgctgtacagcgtgggcaacacgaacatcgtggagcggccgacgcgcgacgcgagcatgctcagtcgcgcggagatggatgccggcgtgccggtgctcgaagcaaaggttgctgcgcagaggcctgaggttgtttgtcttgttggaaagagtatttgggaggctgtttggcgggttagacatgggagggggattcggaaggaggagtttcggtatgggtggcagacggagacggagaatatgggtcgggttgatgattgggctggggcgccggttttcgtagctacgacgactagtgggcttgcggcggggatgaagccggcggagaaggaggctgtttgggcggagttgggaagttgggttgtgaggaggaggggagagagggggttggatcctgtggtggttaaggaggaggtttgatatgggtttgcgattttctgtggctttcatttgtatagatgatgtcgctgtaccatatactatcataagctatgaccattgcttttaaatatattgaacggctttacaaatgggaatgttcgggattaagttaaaagtatttgtatttatttgtaagacgagtgaggttgctcatcattcattatctcataatatcaggtgcagaagcctgttgagtaccaagatgcaaagatgcaaacccagaaacagcaaaaactccctctaagcccattccagggctaaagattgagggtgttgcatgacgtttccccaaatgatcaagcgccaaagtgccatacaacggacgatcgagggatgtgaatatctcagtagaggtcaatgtgaggggtaaaggaagggaggtagttgtccagggcgtggttcaatagaacatcgatgcctggctagcctccccattaaccccgaaaggagtagagggtagatttagcggctgccgttggagtcattcttgccgccctcacgctcgcgtgcctgttgaagttgagttagtatacagaacctcgcaattgatgcaccgaagtggaactgaaacttacagtggaagcctggaattcgccgccttctaggatcttgaccatgcattcatcctcgttggatgtaccgaattcgttctgaagagagctcttgctagcagtgtcaaggacgccctgggctccgtggctgcatccagatgttaatgatctgacgtatagtaaaagaagtttgaaacacttacgagtgagtcaggaagatcttccagccattaagaacttcggtcaggggaatgctgcggtcgctcttccacttctggagactctcgatatcatccacaaagacaacgaagtcgtctgagctacccttgtagaagatcttagaagcagtgtcgtttccgcgagccatattgaaaggatgtgaggtttgaggttgagagattgaatagatttcaagatttgaagatttgaagatatcagaaagatattgatgaatgagaagaagggaaaggtaaaaggtggtggtttaatagtccgaggtgggagagctcaggtgatgatgactgatgacgtcaccctatgagctgatgcaaatagaagaagctcgcgtgttttgttcacgtcctctgcagtctgaatgggacaactaaccacaattagtcagagtggatagggcttaaatggcgtttgtcgttctagtcccttgcttcactacagttcttacacagcgcgccaactattccagcaaagacgacgtcataggagctcccctgcccgctgtcggatccgctgtgacgccaaacgtggggtagttctgaaagagccaagtggcaagttggaggataaagaggactctgctggtattccaattaataattacttatagtccaagccacaattacatttttgggttaattataatccctccttgacttcaatgctcccgccgaatgtaccagaaccatctcaaaaggacaacgtaaaaataggaacctcactcagcatcggagcgggtctttttcagcttcttgggtgccaaggcactaaacagattcttcggagatgaccacttttggggagacgaccacttcttggatgacggagatgattcggaacttccatcttggctccggcgcttgtcgctgcgaggtgaagaaacagacgccgtggggttcttaggtgagcctttgaaaaggaacgtcttcgaccgccgaggcgtggtgggcgtccgaggcacctcacattcgacttccttatcctcccctatctcgctgctacctgctgcctccttgtccattctctcgttctcttcgtccgagtgcatgtccgtcgattctgctctcgaatggaaagccccgacggagctcgaccgcctggtaaaccctggacgaaggctgagccgtctcatgatcgaaccacgtcggaagagatcaccccttccaagaaccattcctggcaatggaaggaggtctcctgtgtagatgtctgagatcagtcgctccagccggatgcggtctattcggcgagcagtcaatgtcaatgccgagcggtcagtagatgtcttaggccgttcaagctcgccttcagcctgtgaggctgtttcttcggtgtggcgtgggtcatttgttttcttgatgactacatgttggacacggaacttgcgggagattgccatagaatccatcgatgacctccgcgccatagaagacactgtgtattgaacgtggtccaaaggtaacagttggagggttaagaaagaatgttttcttggttcccacgtcctgggttgggccacttctaccaaagccgccgacattttgagaatctcagtattccattgcttttcttccactgccgatgatgcactgagaacaaattcgtagttctcatctttattttcaaacaggagcttccatgaaaatatacatccgtatgagcacagtcctgatgggttagatatcggggataaatctcagcggaaagttactcacctcgtccattttgaagcgtatcaatcttgagagagtctagatagacacaagccactgcttccagtcgacgcaggtcatcaatccccttggcaaagagaaggtagcgttgaaaaagtacacagaccatgaactccccgttagtggtggccattgtttgatatgtgacatggagcacaccgcacatgaccaacgggccaaggtctttgtatatactctgaagtgcatgctgcccaaaattcagtcatgttcatctcatcaatgaagatcttgtgcctaccgattccgagatatccaccttatcctggagaacgattgtcttgtcgatacgatctttgttgatcgggtttccagctgataaattgacccgtgttacaagcaaccgtatactgtccaacacttgctggattccatcatgagaagacggacaatcactgacaggagtagacctgagcagatcttgtaggacaagggggtatttgcaaagacgttggatgggctatattccggttaatggtcgaagcactcatcatatttatctcacgcaccttgattaacaaatcattcaatgtcattgatttgtggtcctcttgtctgcgtcgctcagtagacgcgaccgatttcgaaagtgcctcgattccctgatcatatatcgtccagttggcaattgagcggcgtaggagagcaacatcctgtgtcaatagttcatagttgctgcaaaattggtcatacgctgggaatgaaagtgcctataaaatgcccagtcagtgcatacaatcctatctagtacaccaatgcttaccaatttttcaagttcacgggccacttccagtccctctgttggttcagcagtgagtgccatgaggcgctgattgaccgatgccttgagtgatcgagtcctcaaggatcgttgctgaagtccctttaggctgcccagatcaagggaccctatacgtttagtgattccgcgagacgtaagctcagaggcacctgcctgttgggcctgaggtgctgacatgggagatgctctctgaagttggttcaaaaagcgttcatgtattcccaaaatctcctggatgttgtcatagatctcgcgtctcgtatcgaagatcgtaaggatctatgtgtttacagagcacattagcatcaggctaaggaatgacagtcagctcaatggcttaccccgataagggccttcagaccaagtacataatcagactcagtctcaacaagttcctgtaggatatgacgccgtctggtggcccgtgtttccgcagcctcatcagtattctggcttaagcttggccgagagctgtcaccagaatgacgcgcacccgatagtgtactctggtttgttgcgctttgaatcgttgtcctcgatcttatcaagctctggcttccaatgcttgctgtggttgttttgacggttccgaggtgcgatgagtcggatgcactcgactggtgaccttgcgagccatgggaagatgaatctgaccagccctccacatatcgccgttggcatgtgggagattcgtgtttccgtcctcggaagctatctatccatttcttgaatggacgagaagttgacttatcggctagagtcaccccaccgccgctttcgaacttctcttcggactcatcatttagcagggcttgcttctcgatgttcatctcgtcctggtcggccatggtcccaaatagcgatcccgcccaatgaaatacaggactcaggttccgagggcatggagaaagaaaaggcggacctaaccgactacgcaaaacaacggaatggaacttcatggcgagggaagagcaacaaagtgtgcctgcctcgtctacattcccgacgttggaaagtgcatgtatctaaaacagaggaagctgccactatccaggcagtacagagtagagacagcgaatttgaattccatccatgtacgtcatcaggtgaggcagcagtatagctagaattgaaatagtgcattttgattgttttatattaggagtaactgagctttttttttatatcaaacatccaagtgcaatgtcctgaaagtgaagcttacaacttgaagtccacgtcgtatacttcgagtgccaagcatcgccgcttatataaaaaagtgggagctccagggctgcccaggtgccacccccagacccacttgacgttcttctcccactttctttctttgctcaggaaatcatcatgaacgataacattcacgccccaactgttgcctctggaccgacgtccggggtcactccccgcgatctgtccaaactgtcgatgccagatctgatgcaggagaaagaacgcatcgaggcggaattgtcagctcttagtagcgtcctccagtcggtgagatttctggcctagaagttcccatcgcggtttctaacaagcatttcgtgttagcatggagtccgcatgacttcgtctctcacaaccttcgacggtttcccccgtgatgatattgacatcgcgcaaggtacgcccttaccataccccagtcgatcgggacatatagctgaagggagaatgtagtacgcacaacgcgcgtgcgcattattcacctacggaacgaccacaaggaggtgatgcacctcctcgagaaaggtgtccatgcgcatttcgccaacctacaaaatacgcaagacgctggcccaactacaaatggcactaacgtcccaccggctgtgcaatcgttgacaaataacaccgtgttggggacaccgttcgccaaggtcaatagcgtggtttcgggaagtccagcagaccaagcgggactgaaagctggcgatgcaattcgaagttttgggaatataaattggctgaaccatgagcgccttgctaaggtagctcaagtggtcaaagacaacgaaggggtacgttcggttctcccacgctctgtcaaaatacccatatatctgattcacttcctctacagcgggtggtattggtcaaagtctctcggaagactgatgaaacgaacactgacaccacagtggacttggacctccagctcacccctcggcaaaattggggcggccgtggcctgctaggatgtcacttggttcccttataaggggtacttccatttagaataacaagcatagcccggttttgctttcaccgtgtacatgataatatgtactgcttatgaataacgcgattaatgccatacgtcctttctacctgatttcacattatactagttaggctcttgtaataagactggggaaccgtatacatctgaagataacttggcaggcgaacgacctgaccatgagagtttattccaataacctaacacaagaataagtagagtccattgtgaatataatacttcaattgcaataaacattgtcatacacactaacttcacatatgtttgcgccatattgacactacgtcagagcgcctcaggcaaacatccacgtgactcccagcaacggggcaaaaattccatcgagcgccattaattcattccccttctttcacccctcccttttatcaacaacccgcccccataactacggcgcgaactcttgcaattttcttctcttcaagtttctctccaaactatcttaatcatggctgctgaaacccccactttcaagctcgtcctggtcggtgacggtggtactggaaaggtaagcgcattccagcctcgcgatctgattgttgatgggcaagggagtggcagccatctgctcggcgctcagtgatggtcatttcatgatattgatggatacactgagctgcccttttcgttgctagcctctgcccgcgcgcctgtcaacaatactgattatctgcccaacggccccgcctcaccgcgacttcattactaaaacagtgaattccaacagaccaccttcgtcaagcgccacttgactggtgaattcgagaagaagtacatcgccaccctgggtgttgaggttcaccctctcaacttcaacaccgtatgctataccccgccacaaaccccgcttcgcatagtgtcatggtgtcatcgtcaactaacccaacctgaatagaactacggtgctatccagttcgatgtctgggataccgctggtcaggagaagttcggtggtctccgtgatggctactacatcaacggccagtgcggtatcatcatgttcgatgttacttcccgtattacctacaagaacgtccccaactggcaccgtgagcgatcctctctctgataatgaacccctccagattattttgactaactgaactttaggtgatctcgtccgtgtctgtgagaacatccccatcgttctcactggtaacaaggtcgacgtgaaggagcgcaaggtcaaggccaagaccatcaccttccaccgcaagaagaacctccagtactacgatatctccgccaagtccaactacaacttcgagaagcccttcctttggctcgctcgcaagcttgttggcaacccccagctggtacgtcattttatgcctggattcgatacgaaccgatcaatactgactgattaccttttaggactttgttgccggaattgcccttgctccccccgaggttaccgtcgacgagaagcagctcgaggcttaccgcaaggagatggaggaggccgccaaccagcccctccccgacgaggacgatgccgacctgtagatcgttgcgctcaacgacaggtccacgaagtttccgaaatgaaaattgggagtcgctatcccttgttctcccaccctatgttctctcgagtcccatctcacaatcgacgtgtgggaggcagggagtatccgactcccggggattgcctttttttagtttgggttttgcactgcaaaagcaaagtctcttctccgaaatcacgatacaatgaaagcggatgggggatagtcgtggtttgaagacatgcatttttttcctttttgatttcccccaatcttagtagcttagattctcacatcaaatcgtccttttttccctttgcgaaatgagcacacagcgtccgaaatggacgtcctctttcgacaagatttaaaacttcttttcttttactttgaaaatctattcaccagatggatctagatctctgaaattctcgtcaagtgaacactaaatctaatctacctgaaaaaggattgtaaggttggccgtgtagacattattgaatagcagtacaacgcttcttccacgagaaaaaaaaaagaataacgccagggtatagcagtcattggcctccaaaaagagagaacgaaaggatgaaagaaacaaagaaaccgcaaatgatttcgccagatacccatcactgggatagggcagaaaatgaaatatcaatcatatcatcggactatttccagtcgatcgagatcatctggcaaagagaacagatgcaatcaagcaaaattacaagtctctcacaccctgtgtaacggataaggagttagcaaagagtccagtcaaagtagaaaacgaggaaaatagggataaacatacgaagagataagcaagttccctcgcatctagtcgggagacattcatggtaccgccctcatcgagagcaccactgataagctcacgcttctggtcctgaagagtaacaatgcggtcctcaacagtattctcgataagcaggcggtgaacgaagacctctctaacctgcccgatgcgatgggcacgatcaacggcctggtcttcaatgtacgggttccagaaggggtcgaacatgatgacatgcgaagcggcgacgaggttcagaccggagttgccggccttgagggagacgagcatgatcttgcagtcaggatcattggtgaaagccgtcacagcggcgttgcgctccttcagattcatgctgccgtcgaagcgggtgtggttccagccgcggcgggccagggggacttcgagaagatccaagagggaggtgaactggctgaaaatgatagttttctcctctaagccgcggtcttcattggcttggaggatctccagcgtctttgtgatttttgtgctggggaaccagcccttctcgaggcggcgaatgtatttcttcttctcggccttgttcctcaaagcgtccttgcgcagctgggctagagacttcgccttcgttttcttctttgattccgcgtcgccctctccagtagagctatcggagtcagactcttcactgctcgctgttgcttctgggtcttcgtcgtcattgggcccgttggtatcaccgcctccggcggcaaattcgggcactgaggttggatcgtggacctgcttgaatgcattggtgtcggtgagtttcgcagggtccacgggccctcggcagttctggcacttaatcacagctagaccatcgtcttcgaggttgatggctccgtttgcagttgcagagtcggaaatgcggatccagcactccgagcacacatggtgtccacatggaatgtaaatagtcgcatttttgacactgtccatgcagacagggcaggtgccatcctcttcgccgtcattatctttgatacgttgcactacagcagcggtcagaagtttagcgttggcgatcttatccacccccgggatagacggggagggttcgtttcggaaatcctgcatgagaagtggatggcagcatgcctgccgaagacggagaaggagaactagaacatggctgtagttcctgcccaacgtgcctgagtcaaggtaccgggtgatctgcctttgagtggacgtattgagttcctcataaacctggctttctctctcatcaaacacaacatggaccttctcggtgacctttggtgggagttgcaagatgggctcgccatcaatcttggaggattttgtgcgtcggagacagacagacttgactagaacgcgtagttgcttcatgacatcttcgcctccccaaccagatttaatgcgtctcacgaagtcctggatagatataaatgtcagtcagccaaagaagcatacatcaattgtgaactatagagagtactaaccgccttaaactttgctgggttgctataaggccgaatccggaggaatcccaaaagggactggaaatcttcgagacgattcatcataggcgtaccagtcagacaccagcggtaggtagcattgagtcgacaacatgctattgccgatttcgcacttgggttcttgatgttctgtgcttcatcgatgatgacgcgatgccacttggcagcaggactgagaggaccggccgcatttttgaggtcttggattatcgagggatcccgcccttcctctgccaacttttccgcctggagcaatgttttgtagtgcgcagtgattgtaccaaacgtagtgataatgatatcataccttttgagctccttccagggcctgcgccgttgatggtagatcaagactgataattggtgcctgcccggcttgacatggcgctggatttcaagtctccattgatccataagtgccttgggcgcgacaatcaaagtcgggcgtcggtcttcatcctcgaatgggcgagcaaccatcagtgcaatcgcttggatggttttaccaagtcccatgtcatctgcaagaattcctcctttgtggttgctctcttctttggccttcatccatctcaggccaatcttctgatgcttcatcaacgtgactcgaagagcacttggtgtctcatcattgtccgctttagttgcctctcgaatatctttgataccgctgagcaagttcttgatatcttcaggaaactccttctcgttgtaggccctatattaattgaggttagaatcagaactacctgcttcaaaagatgcggacgtacactatgtcagcatcgtcgtcgaatatttcgctttggttgcgaaccaggtcaaaggccttgtcaaacttgtcgaatttgtcatacttctcaaatgtacccggcattgtagcgtacggatgctcatgcgaccagggaaggtttctggaggcagctgctgatgtggaatatggcattgagggatttgacaattgggagggataggccagctgcgaaggatacggcaattgggaaggatatgacatttgggagggatatgtcaactcggagggatatggcaattgagaggggtatgtcaactcggagggatatggcatccgcgagggataaagtccctgtgaagtgtacggtgatttggaatattgcgaagggagagatggcaggtggggatatgaactggatgggcgggctggctgcttgccggatcgatctttgaatgaatcggctgtgatttcttgaagatcatcgtcggaattgaatggattgagtttattgaatggggctatcggggcatatgcttgaggtgcacgattggggtttgatgaaagatgttcgagttttaccggttgactgcggtcaggaatattccatgtatgacgctcattggaacgggggagttgactatgatcctcgtcggcttggagcgcgcgagccaattccgcgtctcgttccatttgaaactctgtttcaatcaacttcgcctgctcctcacactcttcccgaagttcgtttatttcatctgcatcgtcacctgccgcatcgatccagtgcttgtacaagcgctgattctcggcaaggcgggcttcttgtgcagcatctatctcgtcgagtttagatctgtgagatttaggctgcgagggagcaatcctttttgatgatccctggatcgtgggcgagacctgagatagcggacgctggcgtttacgggaattatctggagaaggctgtatcattgatgaagctggcagcaatatcgattggccagacccggccgcgaaaggtgagggtgcagcagaaggccagtgaggggacgcaaatgaatccccggggattccagtgaaagtgttggacgccttgcgtggagtagccgcaggcgtccggactggcggagtaggggatgtcacttgtggtgttggggcggcttgagaagtaggaacaggatcaccaaggagcgtggcaacctggacttccatatttttgatggtatcacgaagctcatctgcttctgcacaaggaccccgcgtcgcgaggagatcatcgtatatgtatctgtaggtatcgagatcctccaaaaggtctttgatcttgtcctcttgggactgatcgaccgaagaagccatggctcaagagcacctggcgctgaccgcgaaatgttccaagaccaaaatatctgaccaaaatatcccgatcgttgagagggtagagagtgaggatggcgatgggtgtgacggctaggacaggaggcaaaatcgtagatcaatagagctaccacatcaagtgagcgtatagggtgaagagtaaagtgttctgggagagtcagccggtgaaacttgggttctcatcagcaaaccgcaaggcagaaagcgggtagcggcagatggcagatggcacagtgatgaagagaaagaaagcatagaagcaactcatcaaattgcgtctctgtgccatctcatatgggtatttgcagaggatgtagacttacaccgagtactatcgacgattcacgggggagaatctgtggatgacggagcggattttcggacctcaggagcgaagaggtagcgatcgcagaaatgagagagccctcgtttctatagtgcaaaagatccgatgggaaggacatgggagttgatgctctttgcgaccgttcagctggccccgggggtcgagatgttcacctctgcgggggcagttgaagttctcgcccaatatgtcatcctctatcgcagtctacagcgaccatgaggactttgatcctattgacttttattgcctgcagaaaattggctatctggagagacatgttagaagactcccagaagatatttaaaagacgtttagaaggacgacaaaaaagagatgagagagagacaaatgattgaaacatctctgaaatcatcttacaccgactagatattcagatgatccaagtcctatatcggtaagggtagaggtgtataagcggccaactattcaactcccatgtaaatgaccaactcactataaatccagagaaacctcatatcaagaggtttcccagcaattcaagtactctctacagagtaaatgtatgttcaagacgttagaaattacttcatagaaggcggaggcataggcggtaaagcctgaaagcaaatcaagcccaagttcttaatggacgctatcatctactatagttatgagtacctgccaaggtcccacgagggagtcttctacttgagcctccatcaggcactgtagttttattcattgctatatgtcgtacatcagtattgaagtcctacagaaaatgttcttcagtaatatagacatatacttcagagtatgtaggtgattctacctgcgtcgctgtacaaccttgattgacataaacgcgctcttatcagaacgtgatcctgcgcgtcacgcgccaaacaagctaaacacagggctagatgatattgccctactatcccaattaggcactggacactccaggcatctggtactagtttcagccatcccggagtagtttcaagatttcgatcatgactgtgagaggttgatatgactcatatggtgcctgggctggaggaatggtcgattttcatgttataagacaaggagtacaacattcgacgtgaagctcaggctacaactgatgccgatattcagaccggaggaatatctcttacatgtagctgaaacgtaaactagggggatcacttggagatatactgaattgttcaactaccaatcatctacgtgtagtgcccatatttcaatcaattgggttgctgcctcggtgatatatatctgcaaagggtctccgcagaaacgatcgatccatcgatcatggcatcggaacagggactggttcgactatggaagacgaagcacatcccagaagttctcaagagctatctagcaaaaaaagacctcaccgcatgccgtctagtatctcgagagctcgctgtctacatcgcaccaatcctcttcgcagacattgaagtccgtttccgcagcagcactttcaacaggccatcacggatggcagctctagagcgtatcgggggacacatccaggccatgacatttaagatctcacatgatagggagaccttcttacctccaatcctggatccaatcatggggacagaacagacgttcatctacacaccacaacgacgccaacatagtggcagccggcaaatgacagagttattagtcaagcagtacccgcctctgttccatgcatctacaaacatcccatcatttgtccaggcattgacgatgatgagcggcttgcaacatctgtgaatctcctgtgagggtcagctaccaagccatcgctatcgccgaagtgtagtagattatgcattgatctcattgcgaatggcaatccagcaagcactattgaaagatctccacacctgtcattattatcagtccacccaggagcggtcctttacctgtgtccagctctaggatttggtgcttcgcctgcatcctgcaagcgctggtcccagacctgcaagctcacggtccaaatgacgaatttcggccatgagccaggtcaaccgacagaccacctcaagctcctccacgcatacctagcaagcttcccatctctgcaaagactggtctttcattgggaaggcgagaggggcctatcacctctatcacttgcaacaaagccgagcctcaacagcaaagccacaggaaagcaaagtcaagcatgtcctcagagatgcgcgtcactcttacggccattgaaattcaagcatcttcagcagatggagctggtcaatgcaacaatggacgcgtcgcaagtggcgtctttcatctaggagcaccggagttccctacgagagttcaacttcgggaacgtggtgcttcgcggcggaaattgggacgacgcgctcgcgccgttgaaacgactcaggggcagcgaagggtggaagcaggggcagcgcgacaccgacaccgtggatgtgccgatagtgttgactccagctggagtcagccagaaacaattatataaggcgatttgtgctctgcagcaacaaaagggaccgaggacgctgagaagcttggccaaagcgcgatcccggacacgtgagctgctgttgtgagacgcggatcatatgaagcggctgcttcggtcttcggtgtttagttggcggtgacgtcaagagcaaggggtacgtaatgttctcttccaaggaaggaatggcataggctaagaccaacaaccgtagtagtgtcgcggcgaataccgcatttgtgaaactttcaggtcccaatgcaacctcagcgtggttcgtgtggagtcggnnnnnnnnnnnnnnnnnnnnnnnnnnnnnnnnnnnnnnnnnnnnnnnnnnnnnnnnnnnnnnnnnnnnnnnnnnnnnnnnnnnnnnnnnnnnnnnnnnnnnnnnnnnnnnnnnnnnnnnnnnnnnnnnnnnnnnnnnnnnnnnnnnnnnnnnnnnnnnnnnnnnnnnnnnnnnnnnnnnnnnnnnnnnnnnnnnnnnnnnnnnnnnnnnnnnnnnnnnnnnnnnnnnnnnnnnnnnnnnnnnnnggggggggggggaagtcatggggggcgaactgtcaacacggggaagactgagagagggaccaagactatgaccggtactaatagaaatgcagatcctagtccagtctagacagaatcctggagaaatggcaacaaatagagcaaagtagaaagaagaatcacagacactgagcttcgggggaaagtgtgggggcctcggcacccgtggaagctgaaggcagttcacatgctctggcagattgtcacttatattcactcacccgccttcttgatttaccatcaccttgtactaccgctacatccaccatgtctctcaagatcggtataacccccttattctgactgtaccagaacccagctaatgaaaatagattctcacccctcgtccgccgccttcgacgtgatcaacgagacgctccaggccaacgaagccagccgcaaggatgccatcaaccaggccaaggctatcttcgccttcaacctgaagaacactagtggtgaggaggcttcttggtaccttgacctcaagaacaagggcgaggttggacagggtcttgcccctgctggcagcaaggctgatggtgagtctccgttcctgatctgcggttgatcttacacatgctaatttctcttcgtcaatagtgaccctctccctctccgataatgacttcgctcagctcgtttccggcaaggccaacgctcagcgtctgttcatgggcggcaagcttaagatcaagggtaacatcatgaaggccaccaagatggagcctatcctgaagaaggcccaggtcggtgccaagttgtgaagattatatacccgtttgagaaattatataccaagtccctcatctagggcgcatattttcggcctcctattcggatagttcggttattcaactccgagtataacaaatgatcttaatatgtaccggggaccgatcatcgctgttcggatcaatgaattctaactctacaagtctcgcacatgcccttgtcgcgaaacccgcccctgatccaaaaccacaaagtaatccgcatccttgacagcttctatgcgatgcgcaatcgtaatgacagtagactgctgcagctcctctcggataatctgctgaatctcaagagaagtctcaagatccacggaagcagtcgcctcatcgagaatgacaattgcacttcgacgaaggacagcccgtgtcagagcaataagttgccgctgaccctggctaaggttcctccctccagcctcaatgtgcgtctcaagattccagccgtgccgactacagagacgctccaggatttcattacacagctcatcggaataatcgcctgtcgggtccagattgagtctgatgctaccggggaagagaacaggatcttgcgcgacgaaggtaactcgggtgcgcaatgcttgtgtgctgacgtcggcaatattgatgccgtcgatgagaatgcgaccagactcgggtctgatgacgctcagaagcgacattgccattgtggacttgccgctgccagtacggccgataaccgctgtggtggatcccccggggatgcgaagagagacgtttataagtgaaggatcgagatgtggtgcataacgaagagttgcatcttcgaagacaacgtcgctaccgtaagttggccatgcggcagggggaacaatggtcccaggggtttcttcttcaatgtggagtaactcgtcgactcgttccaccgacacaaagtccatttgaagttggccatactgcttgcacaatgcatgtgtggaatcgacaaagttgttggcagcaataagcacgaaagctaccagtcctggtgtggtattggtgtataacgccagagctgttagacaaaatgttgagcaagccgacaggccctcaaagcggtacatgagccagctctggagagaccaatagaaatggtccattccctggaacttgtcaaccacagatatgaccctgttctggaactgtgattctgcgtggaaagctcggacagtggtcagaccgtgtaatagctcgccgaagttggacaacaaaggactcagggacaccatttcgagtcgtcgtaggctctgagatgtggggaggaaacgtaggaataccgagacaaatgcgactgtgagagctagtgaaaacaacaaaaacaccggggtagcggtggcgatcaccaggacagaagagatccaagtgatagcctggaaggcaatcacctggaattgctcactaatattgccatccacgactccaatatcagatgtgagacggttcatcaagcgcccaagagggattgtatcttgagaattggtcagctttgtcctgttgagtcaatctacatagaacttacccaagtatcggaaggtcgcatggctgactcggaccaagacccgtcggaacaaggactgcccagcataatagacgatgaccagcattagaagctgagcgacaaggagtgtgaccgcttggaaagagatgatggcaaaaaatgtccatagccagggtcggacatcctcacgcggagatggtagttggcctatggggttcggaggcgtaaagtgtgtgcccatgctcaagttcgagactggccgggtgctttgcgctgacctctcactccaattcgagagatcccctcgaagagcagttgtccgctcatacgcttctccccaccctttgaggaaccatgattgcccgacagccatcagtcggtagatcgccagaatcaggacgagggtaagccaccaccggtactttccagccttaatataattccagtacactcgggccttgacacccccgtctgcccggtgctcttcctcgatgaatttatcaggcacggcagctgtctcctcctcgagggtgggttccgcttctgtttcgttttcaatatcgacaaattgcagagaagactcggtcacgtcaagcttgagggtatccttgtcgtaaacagtggcatggtttccacaaatattgataatttgatccgcaatttgacgaaccaacgtagttcgatgcgtcactagaacgatacttcgatctttcatcaaaggccccgagaagcatttgcggactatcagctccgcagtattgtgatctaacgcagacaggggatcatccaaaagcaggacccgcgatgcgctatagacagctcttgccagagatactcgcgctttttgtccacctgataaaccaatgccattttcacccacaaacgataaatcgccatgtttgaattgagcaagatctggaagtaaggcgcaagcttctagcgttcgtttgtagcgctggtcatggtagggtgcggagaatagaatgttgtcacgaatactcatgctttgtagccacggtgtctgggcgcaatatccaaccatttcgtttggaatatgcgctgaaccggaaagtctatcgagttctcctagaagagcttgcagaaatgcggtttttccagcaccgaccttgccagtgacaacagtcagtcctttggggatggtgacattgatatcaacaaggacgggtgagacctttcctggccacgcaaacgaacaagaatgcattgagagtagagtatcgttcgccggggtttcagaaggcagattctccttgtctggttcggacatgaagtcctcgatacgcccaagggcaatgaaggcattgataaatgatgtgataagaccaggaatatcccgaagacgagtctctagcatggtaaataattgtaatgcaggaaagataatatcaatccgcagctcatgcccggccaacaaggtatacgcgtacaacgcaaccactggaaacacgccactggcgaaagcgttgataaagcgaatcaggatactccacagactagtcacaatccgaatattcaactcatgctgtcgggcctccattacttgttgaagccagtgattctgccacccgtaccatcgcagatgacggattgcttccacaaattgcgaagttatttggagtcttgtatccgttgccactcgtctgactcgctcccaacgtagaagagctctagttactagggcattcatgatctgtgcaaccaggacggctaatattcccagaaaacaagacggaccaaagagtgtccagacaaggaaggtagcgatcacaagtcccagtggcttgtcaatcaacgaatcaacctcccagaatctctgtgcaacttcataaacatctccgcgcaagaggttaaagattttgccgagtgatgctgcttctttggcttgtttctgtggctttttttggttgcgagaagtgatacgttgccagaaacccacggttttggtagggggttgatcgttctcttgagctccggcctcaccattgacgccatcttcctcgtcggatggtactggatcgccctcaatcattagtccagaaatgttctttcgagaaagggctttttcgtaaaccatcatgatcatttcaccccttgaccgttcatagcatcgtctcccgtaccacagaagtaaaacctgagactgtgcagcgacaagtcgaagagcgaaggacatgaaagcataggtcaaaggtacgcgttttggtcgggacgggtctttcatggcctgcaatagtttctgcaataaaacgggagtagaaaagtctgtgaaaattgttagcgatataagataaaagaagacatctaaattcataccacatatcatctggacaagcgatatggttgagatgattaaaacatcaattccattggctctcaacagccggctgaggacagaaccacgaagtcgacgaaacttttcatgcaggcgggcatgttgaaagtcaaatccaagcaaccaaacgtctcgttcatgaagttgtcttttgcgcccagttaagatcagcggtgccatccaagacactgtgaggaactgccagagcctcagattatcttctggggtgcgaaagttatttgatggctgttgaccaacagcactaatatctatcgatggcaaagactgttcgcggaatggcattaggaggattgttgcacaggctgccgccgctgcccctgcggcaatgtagcgagcaacaatcttgaatttcgggcatacatctgggtgagtagccaaagaaagttcaattgtaaatgctagaaaataatacgaaagcatcaagatggaacatgatctgggccgcttgactgcgaccagaatagatgctgtggcctaaagagggatatcagtaattgatactcccagagacgggaagaaccgacccatgagagaacaagcgcaaaggccgaggcgtcaattgtcggaggaacaaattgaactgtctcggctagaagcccagtagccgaaaatagaaggagagagatagtccatcgcaatgattgcttgggctgatctagcgggagatcttgagtatcatgttgctcagacacaaaaggaacagtccacttggggcgccatcgctggcaggagtattcaagtatatggcttaatgcaataagcaacactattatggccgggatgcatgctaggtatggcaatgcacaaggtgataaccacgcattgtgcgagtcctggattggtcagacggtgcgagcgggaacaggggcccgcgagtacatacccagaattggtcacactgggatctggatgcaccttccagcggaatttgattcatgcttggtcccaagtgcagtggcaactcttcgcggtagccttggggacctcacgaagcaacgtggggccggatcaatattcatccgctggcccgtgtcatctatacaggcgggtcagagtttggaatttagttctcgcctagaacattatatagagagtttataaaccgtgtacttgtttcaatggtgttgcaattagagctgttgccttgcagggaaatatgccgagtctatcgggcggtcttacggcttcaatgggcggactggcggagtcatccgccgcggggcgggccccccccccacagcgatctggatgcaccttccagcggaatttgattcatgcttggtcccaagtgcagtggcaactcttcgcggtagccttggggacctcacgaagcaacgtggggccggatcaatattcatccgctggcccgtgtcatctatacaggcgggtcagagtttggaatttagttctcgcctagaacattatatagagagtttataaaccgtgtacttgtttcaatggtgttgcaattagagctgttgccttgcagggaaatatgccgagtctatcgggcggtcttacggcttcaatgggcggactggcggagtcatccgccgcggggcgggccgcccattcacagtccggatgaacctcgtcacaggcaaactacatttttaataaagcctactaaggctactaagttagaacagtaatggctggagtatctccccaatacctggcgcatggtactgatttatgcttgaagcaaggcaggctgcttatcctgacaacagaagaatgcgatattaaagcggctacatagcccgcctgagaactcgtgttttactatgtaataacacaatgatcccatgaatctcctgcatcaaagagccttccacggcaaatcgctcgatggtttctatcgtgttcttctgcaaagtatcaatatccggtactaagtgggccaaagctggacaaacagagcctagggtcaggagaagaatagaagaaaacatccttaaagaatcaaacattagttgagtccaagtataaagcatctcgtagacatacgtatgaataatgatttctgcgcaaaatgacgggcccaccagtctccgcgttgaggcatccagatacgttcgacaattggctatgctggactcgcactgtttgagtaccatagggggaacatcattctcgggtgatgagtcaattgcacaaagaagaaatggtctagttatgatatccttggcggagtggaagcggtggagcatattgagttgaaggccagtacatcgtgacggatcgttcatatctggtttaattgttcgcggtaataagtcaaaccaattgtcgagctgccgggcaagctcttgggagacattcaggatcgcagagagcgattggaagtcataagagggactgtcgcttgagactggctgtagaccgaggctgcgccttgtccagtcacttccgtacatagtgtggtgtactctatttagtaggcgacgaatggatagttcggcgaggaagacgtgtgtttctttggcgtcgttatttgcaaaggttggaaaaggtgtcagatcaattacatgttcgataccgcttcgtggtaaatggtgttcagctatcagatcactggtatcaatatcagcatcaacgtgatttacccggatgggaccaagaaaccaaccactcggtgtcgaacgctgcccacgatagcagaataatgctggatttgaggtcatgattatctgccgaagcttggcttctatcccaaacagatgcttgatcaatagctgaaatcaaacggaaggacaaagagcttaacgaaccggctatttaaatactggatactggtggaagccatgtggaccagtttccatgattgcagagggcgtaaaagaaacccaaaatatttcgaaatgagtatcaaactctggggaagagtgattgtgggacaaaatgaaagtaaatattcattcatcaatatctgcaacgcaggtgaaatgaagtctgccccaggcacccagtatggagacttggactttatcgggtcaacctgctcgagagctgcagagcctaatgcaagtactgcaaggcatagtgcagagtcacagtcaacgctcagaccggccctaatatggtgatcgtaaagccccaagaattggtctttgtcaaggattggcatctcaacatggacgtgtttgaaatacgcctccactagtggataagtgctcgtttcattgaggattggcaactgactcgctgtaattgtacctggaacaaaagatagctggtgtggcatatgcctttttgattctgcgcgtataaacaagtctgggggaaactctccgaagagcgcctttactctagtcatatgcagcatatattcggttgttgttgtatgaccgatgggaatactcatgggtggtatatcatgttcaggtggtatgaaagtagacgaattcgtacttataagctgggagatatccgccgggtttggtcttgacggagacgaaatcaacatggtagaaggatgagaaaagtccgctctttcattctcagatgacggcgggagtgtgaaatcaccactccttgtttcaccagtctggggtgtttgagggagtctcggatgactccataagaagttctcaattgcatcgagacggcgaaagaactccgaagaggaagtttcccctcgaggcctgtcggggttcagtaacgatggcgaaacttgaaaaaaaaacaaacgggtgtctcacctcgcagtatcagcttcattataaacacaatcaatacctgaatcctcacagaggctacaggagggtatcgcaccattgcagcgacgtttcctgcttgtctgtcagcatgaggaaacttggtcataggagttaggggaacctaccgcctgcgacaatagttgcatgccaaagaagcacgcttacgaccagtttccatgtggtaaattatatgggcttcaaggcttaaagccacctagatgaaccgtgttggcgttgatgtcgatacaagacgggaaagtccgccgggaacccgcttccacccgtgaacagattttgttccgccttagtcatcgacacttccgcccgctcgcccagccctggggaaagcttacgatagaggaaagataactttaatcttatttaatacttaacagctcatcaacccttccaatattgtttttcgctctcttctcttttatttactgggaaaaatctctcttcgacctggacatctccatctccatattcctttgcagtacggagaacggaggacacaacgccccttgccaagaacaccgacccacaccaaggccgtttaccagtcttctttggcttggttccttaggtatatactattgtacaattaggctgactcctattcaagatctttgttttcaaggtcattactcgttaaattcaaattatctgaagccgtagacatggccacgtttaaaaatgagattcaaagttgtttcgggccgaccttcgggaaactctcggctccacctgagttccccggctttcagagattttttagggcttgatcgagatcgggaatacccgattcttttcagtctttgaaacatattgagagctattaaagttagaggtctaaagtctcgactaagtcgcgtggaaggaacaccatgtcggacgaaaagtatgttgcggacagcaagatcgagagaccactcgaaaaagacgtggagaaaaaattggacgcgacgcaattggagccctttggaaatgaggacacagcggaggtcaagtatcggactatgaaatggtggtgagttgttaattcctgcataaagattgtgaattcgaccatggacatggctaatcaagcttgaaaaggcactgtggaatgcgtgagtagctaaatttgagatcaaaagcttggctcctaacatctattgcagtcatgatcgcagagaatgtttctgtcggaattctgtctttgccatccgcagtggctacccttggaatggttccgtatgtattctcttcgacagcttcgagatcccataactaacaatgtcaaacagcgctgctattatgattttgttcgtctctgctctttcatggtatactggctacgtcattggccaattcaaacttcgccatcctgcagttcacagcatgggagatgccggcgagatcttgatgggtcctttcggccgtgagttgctaggacttggccagctgctgctgttgatcttcctcatggcgagcaacattttgatgttcaacattctgatgaatgtattgaccgatcacggtacctgcacgttggtgtttggtgtcgttggactggtcatctgctttttgggtgccttgcctcgtaccatggacaaggtctactggatgtccgtcatttgtgagtgcagtcatgacacttttcaactcagatgagaactcaactaatgtgtatgaagcattcttgagtgtcttcgttgcgacagtgttgaccatgatcaccgtgggagtcgagagcaaaggacatgtcaagaacgaagcgacaacggatgtcagcttccgcgaaggttttttggcggtgacaaacatcatcttcgcttaccgtaagttaaacagtgaatcgccaaatgatgacggtgaccagcacttgaaataaaccgagctaatccagagaccgatcttatagtcgcccacgttgcgtactttggcttcatgtctgaaacagaagacccacgtacattcaacaagtcactcgccatgcttcaaatcatcgacaccaccctgtaccttgttagtgcactgctcatctatcattacgtgggaccggagacagccaccagcgtcggcgtgcaatcgcctgccattctctctctaagcccgttgatgggcaagattgcctggggtctttcaattccaacggtgagtttattcttttggttcgtcttctgtatcccacttactgattcaatacagacaattctttccggagttgtcttgggtcacgtcgcgtgcaaatacatctatgtgcgtatgttccgtgggtcagacaagatgcacggccgaaccttactgtcgattgggtcctgggtcggtatctgtctcgcagtctgggttgttgcctgggtcgtggcagaatctattcccgtgttcaatgatctgctgagtctgattgtaagtttatcgaatctcactcgaccgggaacgtttgctgatgtggagattacagagtgcggtctttggaagttggtttagctgtaagattgacccacctttccatcattgaatttcaagatctgaacaagtgctcacgtatcattagtcggactcccggcgatcttttggttctatatgaataagggccgttacttccagaactggaagaagactgttttgacgattaccaatattttggtcttggctattgcctttgctattgtaggtatgcccctacttatatccagttatggtggctaatcctttccagtgcgggttgggactatgggtgtcaggagtcgccattcacgaagactccagttccagaagttggtcttgtgccaataatgcgtgattgaagagttgaagtttgacgtattcgaatactaacaaagccagactatgccgagtctgcacatggcatgtcggttaatctgcaactggttggccacggactcgaagaaaaaccgttggcgatggcggattgtcatctgaaatccatcgccccgtgactaggacgaaccaacacgaattcagacattatgactccaatatcaacagacgtgatttgagatggaatatgcagcatcacggccttggcggtagaaagcaattgtgcgtagagtggccgttgcaccaggacgagcgcgcgactggatgaggcaagctctttctaaccaaaatctaacgaggccggagactcgcacaatcgtagtcgaattcatggtcaaacctgtttctgtcaatttttggcagccgatcgaacaggctcaggggaggaaggggatgttgtaattaagaggaattatttccgagcggcctccttatctcatgagaaagaacctcaaatataccaatgtacttggcaatctcaataccctcagacagcgtactttagtggatgtcggcaaaggaaaatccccgactcccccgctttggcggaagtgtcccgcctcccatccgcctttccccacctgacattatcgtatcggtgtgttacttccccgccagcgtcagaattattattctcacagagctcgctacttcaaacttgctgctggtagtgatcgtcaagggcggtgtattcacgctccacatactttccactccttcttacatcctctgcgcccagtgtgaactgtctgtcttggaatttagccttacagaatcaatatgcctaccaacacctcagcaggagcgagtgaggaccagcgtgcctctctgatttcccgagtccttcctagaatgactatgtcggagggatcaagtccgctcactcgccccctcgctccagtgccctttacagatggtcgctcacgagcagaagcacgatttcaagttcagggcaaagccatagtcaccggcggagcaggaggactaggcttagtctctgcacaggctctcctggaacatggactctcctcactatgtatcatggacctccccagtacgttggagacgtcatcagaacaaattcaatcactagcatcaaagttcccctctgccaatataaccaaaattcccctggacgtgacatcaatggagtcaatcgaagccgcatttgaacaagcaaacaagacaatggaaggtatcgacatcctctgctgcttcgctgggatccccggctgccaaccatccctctcagtaacacccgaccaattcaacagagttatagacgtcaacctaactggatcctttttctgcgcccaggcagcagcaaagcgcatggaatcctcaggcaaaggcgggtgtgttttattcactgcgtcgatatctgcccatcttaccaatttcccgcagccgcaggcggcttacaatgcgagcaaggctggggtcgcgcatatgactcgcagtctggctgctgagtgggctgttcatgggatcagagtaaatagtattagtcccgggtatatggatactattcttaatgctggggacagtttggcggatgttaggaagatttgggattctcgttgtccgatgggccggatgggagatcctgaagagattactggggctgtagttcttctgtgtagttatcgtgcaggacggtacatcactggtgctgatattgctgttgatggggggactttggctctgtgacaatatggtagatgctagctacttttcccctcctgtcattggttccgcttgtcttatctcagtctgcatcgcgggtgtccttctcaagctttgtctgcttacttctaattctcaaatcagtttcaaaaaagtagtgtttcttcaagaattgttcattgtatctttttaaatacaggaaagaccgcacagcagctttttccactcctctttaccggcagatgtaacctccatcaatgcgcagatcggcaccagtagtgtaagtactagcatcactggcaaagtacacatacgccgccttcaactccttaggatcactctggcgacccataggaatcatcttattccaaccctcctgaatatcagcaggcacaaagtctcccaaaccggtattaatgtatccaggcgagatactgttgacacgagcaaaatccctccactcattcgctagcgagcgagccatgtgaatacacccagccttagcgacattgtacgaagtctgctcctgagggtaattgacaatgtggccggacatcgaagcggtgatcacaaagcttcccttgccgcgctccttgaaatgggggccaacagccttcgcacagtaaaagaccgagttgagatcggcctggatgacatcgtcccagtcctgaaccgagccctcgagaacacctttatcggcagtacggcccgcgttcgcgataaaggagtcgatcctgccaaagtcggtgatcacgtttttgaccagctcttgcacttcgtcccatttgcctgtgtcgcatttgtaggccttggctttgactccgaactcctcttgcagggctttggcgtttgcttcggcgccctcggggcgcgataagtatgtgatggcgatgttgccgcccatttcggcacagccccgggcggcttcgtagccgattcctcgggggccggaggcgccggtcacgaccacgaccttgtctttaagactgaagaggtctttgagagagctggcttgagggacttcgataggcatggtgggcgagaaaagggaggagttgaataggtgtatagaaggaaagatgaaattattttgaggattgttggtttgtgtggaggattaaggggtcatagaagggatctatggggtctttataccttttcatcgttgatggggactcgggtccaaccttcccaccgtacaactgtgcaacttgttttgctctcacttgagatgttgtccttctccacccggcgggacactcggcggcacaatcccgccagcatttctgtgggcactttggaggggcggatctctcaaattatttctcattttggtagataagataaatttagaaaatagcaaacgcattaggcgggctagcgacacccccgatgacctagaccgagtctgaatcagcacaatccccgcacagtcaataagcgggaaaccaaccttcaaaggcatactagacaagaaaaagctatagcgtccactagccttgcaatgttccgataacttctccaaatcaaacatctccccaataggagttccccagcccgccagcacccactcatgtaaattgaaattcgggtccgcatgggcacctctaataggcgcacgctcaaaactcggcgcatcaccagcgacagcagagaattgatgcgcccataaccatcgtaccatacactctgtcgcctcgacaccgctaaaatcgggcgatgatcggagggctaggtccttgcgctgctggtcgtccagcttgttgtatgcagccgtgaagccactgcggataaagagaatgtcacccttttgaaagttgaggttgtgatctttgactactcgtttcaggttttcgacggtaatggtctcggatttgagggcggaggtggggattgagtttgtggtggcccattctgcgtagtcgaggaggacgccgcgacctgttattccaccgtgttcacatatggctgaggggttgagattagtacggggttaatcatgtaccttgaggtgatgcatacagtgaattccaatgatgtccgagctttctatctcttccgtggtatgtccgttataaaactgcctggatttctggtttgctagattcgccaaccaataagcaatgatctcagacgccatagacgctcaataacgcaccgtaatgtctaaatccatcccattgggtagacccctggttattgaatgccaaggtgtcatcatgaatacaatttggactccgaagaataagctcgtgcttaaatggattgcgattgaagcttggatacgaaggcatgctcaacggccagtcaagagagattcgcacgccagttttgatttccttggcggcttcgacaacccgctcgggggtgagcaggttcaatgtcccaagttggtcatcttgtccaaatcgaccccaggcattccctcgtgggcctgttgggtctagtggaagggagtcaaacgagatcattgcgtcttcagttgctttcgtcatgatgaacggccccgtgagaggaaaaagaggctgaaggtgtatatatgctgttgttatacgaacgggtatagctttagctcttaaatggaagaggcgaacattaaatacggcgtataatagctcaatgtcaagacaaaattgcgtactcggatatgaatccgcgtgtgggggaagcttatagacctcgggatgagcggggtctacggggtcaccccggaatggacagctcgggagctcggggaaataaaccccgcgagtgcaaatcatacaataccgtttttttaacaactagttacaatcaatactgcaaattcactcggaagtattaagaaacttgaggcttcgttgatttctcgttcccgtgacaacaattgctaaatcagcacatgagagccaatctagtactggatactacatctttcgaatcgacgatactatattcgttggggtcatcaccttcccttcccgtgatgaagacaaacaaacgtatatgttgggtgtttgcatcactatgctgataaataagatcagcgctgtcaccctcccctgcggaatacccatctaccaactacccgatgatgatgagcgacgatgaagacgtcatttgaaatgccgttctatgcgactgaattgccctgcccgctacctactggtactgaaatcgagaatgccccggacttatccatgcgacatggagggcgaagaatagtcggagtaggccagcattttgttgtgaaatttggactaggtgtcgatcttattgaaggagaaagtatgttatttgttcggtataatacaaacatccctatcccgcgagtcttcgccctatattcggatctagagataggcaaaaacttcattgttatggagtgtgttctcggtcaaatacttctttcagtatggccgcaacttataacatcggaaaaataggaaatactgaaagacctgtagggatactttgacaacttgtgccagcttctatccctagaatactttggtagtcttaaccaaagacagcttctagatgatatattttggacacaggagccagatctattagtgaatggtccttttaactctgaaggcgatctcaacgaagcaatactacgaaagtatacctacaacggaggcccgtactatagggcagaatatcttcagaaatgctttccttttgtttttaagggcaataaggcgacatttacccatagtgatttataaagaaagaacattatactatacaagaaacctcatcgagaccaagaaggggggcgcgttgtgataattaattaggaaaatccggatggtatccagggtattgggaatattgcctagctgtctgtgctttacgatgggatgacgactggtccctttggatcgacggtatcctatcaccgtgtgtctccgaggctgcatactttcagtcactacgcctagaattatggtcatagggatattcaaagtcatttcgtccaactagagaggatgtgatcgaaattttgactagattcttacattaggcataataatctaggagtggttaaactatagaatttgagtattgtgctagtatcaaaatggtaataagttcttttgtcaagagagagaaaatatagatgctggaaaagaggggctggtgaaccccttcatgcaggatatataaggggcgcatacgatcccactgctaccttgtcaccctatcgcacaaggagccgcagaaaggtatatatgttgcgattgcctttcttggattaccctgagtctcgttatatccgaccttctcctattctcaccccgtttgcatcctctatctccaaccccaatcgcgcacagcccttctcggggcgtgcaatagaccaggaaacggtacttggtgagaccatttggaaatcatgtaatacgcattgcttaaatatggacttaggggttaatcctcatgcgtatacaagtggtcgatggcttcggaacgataagcatcaacgccagatacgccatcttgatattaattttgacgaactctgccgtatcatggaacatgcggcaggagttcagttacaacagaagtggccctatatgccaggcgactagaaggttcgatttgtagatgccatctacagaaagcttaaagagatggccgacattgactttccagcctatggaagcttatatctttccaccccttcattgggctctttctctgggctactactaaatggcggctttcgcctcggaccccactgtggaacaagatattgggattgtggcgagcgcagatacgaccagcatacacttcccaatcaaggcccttgtgagtctctcctagcccattcttcagaagatgatggctaaaatttgagggtaagggttgacattgactgcatactctgatggcctagtggatgcaggtctttcaagagttccaccgaatgactcctagatctcaaatcgaccattctatcacggctcagttcagtcacatttagaccctctcgaacgtggtcgtacagtgctccattcgatgtctgcagatacccaactacatgatgcagctgcgccaatcctctttcaccccgacctacataagaggaacatatttgtttcggatgatgatccctcgattataactggcattattgattggcagtcatccagcatagagccagccttctggtatgcggatgagattccagacttcgcaagttgttcgccttcctccgaattgccttctgggaatctaaacaacagcgagctatgcagagacaccttcgaagtctgtactcaattcctcaccccaaagctcgtcctccctaggatgatggatgaaggcatgttccgaccgcttaggtactgctacagaacgtggaaagattgcgctgttgctttcaggcaggagctcattgaaacttctagggactgggaggcgctaggactcgttggctcgtgtccatttgtctcaccgagaccggaagaactggctgttcatcgaaaagaatacagatgctttgaggcggcccagaacctaaaacgtgatttgtcaaacttgcctgattgtgcatctgatggatgggttcctccagagatttgggaagaggcaaaattacaaaacaaggcaatgttcgatgggatgttgcaagctgttctgacaaatgaagatcctaatgaggatgaaccaattagggatgaaagggacctgagagatatctggccctttgatttgccggacgagtagttggtctcatctctcattaagttccataagcttagggtactctttgaagacatgcattatgcgccccctacggagattcaagctaaagaatttcttgaaatcagagctgtgtatcattaaagctcaaacgccttgagagtcaacgatcttggcaactagtccaatttacaccactgaaactgcatatgtactggatgatcttcggcattcacgacctttccccttccataactaaataccctagaaggtgaagtacgcaatagtagcagcgaacgtagccagattgtcgccaaccgtcgccaacgcagtaccatccttcacaatcatatagcttgtcccaacagtgttcaacccatataccaccagtccacttgtactgccctcaacgctgaagatcatactttggcaatcctctggaagggggaaggtggagcaagtggtgctgtagttgttgaaaaagctgtatagcccagccccgtagataatcacatccttggtattgagaatccgaagaccaagagagtcgcagtttccgccgagacagctgctatagtcagggtcattgagagccgagttggtagggtacgggccgttggctgcattgggatttggttgatagtatctgcatgcaattggttaggacaggagatgcaagggcagcagcacgtgttggatcacttacggagtttctgtttgtatgaaccctgccacaatcgaactcgcgcctgagaactgatactgatacagcgagtgatgctcggacgccgttccgtatcttgcgccgatgttagttatgagaaagcattgtgaggattatctgtcacttacaaccagacattatttccttctaccaagagaccgcgaccggtatagaccgagatttgagtattagtagcgctctcaaggtcatggtcggcggtccatagccagacattctccaagtaaacaccactggcgactttggtaatgtgcatggacatgtaaccaacctcacagcctgccgagacagctgcagtcgtcgggcactgagcaacctgctgctgagatccttggaagcccccgattcgagtgtgaacatcccacatcccagcgcctgatgtcgctgccaagttccactcaatgagtacagcgcccggcgtggagcccgcggtgctcactatcatatcagaccattcaacgaacccagattctccagatttgccaatttgaaccaccggaacgggattggtaatgctcgaccatacactgccggttgccatgatgacaggatatgcctctccgacaatccgagagcccggtgggacgtaaatagtgccggtgactttgtacgttccttgatcaaagaacacaatcttacctgcagatgcggcagatgtcagcgcagactgaatggctgtcgtgtcatcggttgaaccatctcccctggcgcctgcacttctaatgctgacaaacgaagcaactggtgattgctcatactgaggctttgacttggtaaaatatctgttcgatccaccagcaagcaaagcgctaggacgtgtcggtgcagtgaaagagccctggaagttggtcggtccgtttggagtatatttgtggccttgtccccaagcagcaatggtcgtagaggcccccgagccagcaagaacagtaccactgacgcctttgactgcaacggggacgttgttcagaattatgttctccagaatgagacttccagttgatagtgtggaagtctgccaagcggtatcgacaaaggtagggcagttttggatggtgctgtcaaggatattgaccgagccaacgagttgggccccagcaccaccattgctgatcgaaatagcagttgtgcagttagtcaaagacagaccttgataagtccacccccagttccagatctgagaaattgcggtcactgaatttgaaatggccaggttccgcattgtgaattgctggttgccaatattggcaccatagaggccaccattaattaccacatcggtcaaccagccaccagagcctggtattggattagtatagacctaaaaaaaataaagtagcaacataccattctcaatgaaaataccctggtgctgtgttccagaagcagaactcatagcaatgacaacgttctcgatgctggaagcttggccagtcggccaatgaataccagtcgcagcagtaccggcagggattgaggtcaagtccaatttcaaattgcgaacctgtctgaagaacacattcgtcgacgtccagccctggtttccatcgctctggtattgatcaccgtcaatcagccccagtccgacaaaacctgcggttgcttttataacaggcattgcattcgggttgccaatcagctgggtgaaatagtaatcaataatcgacgatgagatcaggtacgttcccgatgggaagtagactatcgcaggagtcgtggtcgaggattgtctgcttgccgggccaaaccggccaccggcgcttatggccgcattgatcgcggccgtatcgtcggtcacaccatcacctatgctcactttagtacgtctcaggtagtagcgatccttcaatgcacacctatagctccgtagtctttcacgtttcggaagacttggtagccagaagggttcgagttgaaggctgcgactccttggtgggcgatgtctgctagccagtacgcagcgtctgctgctgccacggctgcaacaggagagttgaccacggcgaccttggtctcgaagcttacagcagccgaggcagtctttgttgaagcaccgaaggaagtatactgctcaaaagggagcatggcagagctgactatagcatccacagcggggatctctagtagctgtgcattggcacaagccaccaaagagaaatacttgatcacaaaagaataatacatcttgaccctgaatcattaaagaggtaagttggcgaggcaggtgctttcgattcacgggctatggaagcatgggcaacagaagccggggacaacgtggtttatgtatgtatagcgacctggacgatgctgacagtagacacaatcggataatgcaggcatgcgcatgacagaaaaggggtagagtcaatgaccctgtatcttcagccgaaagaaaagcaaattaaggaatcccaccccgaaataccactcaagacggggaaatatatagcgagtgactgcagaccaaggatatccattggctatttatttccgaggaggtcaattttcccgtcatgccctgttctctgtttcatgtcctggaggtgtcctagtggaaatgagaatgtgaataaatggcgcagatcttttccccacaagagatgaagtaccctgcctctacctgcatgtcagccaatagccaatcgatgtctacacagcatagagcccgagctaaactgtgagtttggcgtgggtgtttcctgataggaatggaatgtgactagttgagaattccacccttcgcagtatgtgatatgtgatatgtgacttatgggtgtgtgtgaccggttggtcagagagtctaatcattcagggatttatgctcataacctttcttgggattcaaagtgtcctaactttgactaacttaaatgaaattaaggtcagcagacccatggaacgccatgctttaagtgcggggagacgagaccgaaggctcaggtacttccgtcttataggtcacactcaccttcgtttcccttgactcgaacattgtgatactcaagtggcagacttagctaggtcgggttttccggtcacccgcaaggcgtccagcccactcagtgattcttagcctcttgtgttctcagagtgtacacatgcatcacgcagagtccctttgtatacttgctcggcggtgcggaacatcaggaggtacttgaacccactagctagaattgttatatgcatagatttagactctgcttgatataaaagaatccatcatgctcttttcgagctccagtgtgccttgtaatattggtggaacggatctttcttccgctggtcaacgtcggcgacatcatgaagtgagcgtggcttcgatttgagtataaagatatccccctgtgctgtcaattcatttgctagaaaatgggccgatctcattcgagaaaatcatgacaatcgtattacatcccctttgtccaatgcaggcagacaatagtttgtaaagtcgaaccttgctgccaagaaataccacgtgactcgttcttgtccgccttggatgcttcctgcaaaaaaaaaaatattatagtcgtgcctcctccattattgtgttgttggacatctcaagattcgaagacaaatatcatcactgacagcaataaaccatcgacctgtcttcgaccttactttcgccaactcgagagctccttcgtcctgctgacagcttcctgcgcgacagatcgcgaacgtgtcacggaaccgcgaataccaccggacaaccacatcgaagacgctagagacaaatgggtttcgctctctccgcgattgacaatatctaagtggaggataacaatcatcaaagctgttactctttcgagtcggtgtggagttggaaagagcctcgccgtacacggaaagctccctacttcgattgccgccagtgagggaactcatcaggcgccataccgaggtccactcttgcatcaagcttgattcacgtctttaaccctggtcacctagattccgaaggttacgatacgaggcggttcgagcttacaatcatacaaccaacagtggtcttcatacactcaatatgttgaaacgtggagctcaaggccctcaggggtccaaggaagacgagggtgctttcggaatggccagcaccccggatgacaagccccaccgagccacagcggcccagttagccagtagaaagtaagtaataactcaggtagcgtttggatgaccacaaactgaccgaagatctctttgcaactttcaggatcaagaatgttcgctcacgccgggctcctactcccacaaccggtggaggcgcatccgatgcggcttcgttcaaccctttcgcatccgcggccccggcaccagcgcctacccagactgggttcacattcggccagactcagagccagagcttccctgggacaaactcgggccccggccagggtggaatcttctcatcaggcactaacggccagaccggtggtcaggcgtctttcaacttcggctcgggcccaacctcatttggatctgcaccgtcgagcaatcctttttctgttgacacatcatttggcggaactacccagtcaagtaccaatggattcagttttgggggattcaacgccggaaaccaggccactccgtcgttcggtgggttcggagcgcagcagaacacaggcactccagcaaagcccgtcctatttgggcagtctacaacacatatgacttcgcctgccgatgagaacatgcaaacttcgcctgataacaagcccaagggggcttccatcttttcacataagccagctgcacctgagaaacctgccgacaaacctgcggagacccagcctttcaaaccgcttttcggatcaacacccgccgcttcgaagcctttcggtacagagaaaccgcagcaaacattcaacaatccatttgcgaaccttccagggcagaatgcgtccagcaatttatttgcaccaaagacagctacatctgagaaacctgccgagaagcctgcggagacccagcctttcaagccgcttttcggatcaacgcccgccgcttcgaagcctttcggtgcagagaaaccgcagcaaacattcaacaatccatttgcgaacattccagggcaggctccaaccagcagtactaacctgtttgccccgaaaataacggcagctgagcaaactcctgccaaacctgctgaggcggcaatgccctttggtactcttttcgggtccacctccagctcccaaccctcggggcctgctagcaatctatttgcgcccaagccagcggcagaagaaccaaaggcgagcaatccatttgcgagcattccagtgccgagttcatcaggcaatttgtcctcaccgaaggttactgagaaaactaccgaagcacaaccgttcaagcctctgttcggtacacctacgacatcgaaagctgtggagactggaacgcctgcaccagcatttggcaatttgttctccccaaagccggtcgctgaaaacgcggctgcaaagcctgcagcagatcagccgttcaagtccatgtttggtacacctgcggtgtcgaaagcctcggaagccgggaaagaacagactgcttcacccgcatttggtaatatgttctcaccaaagccggttgttgatagtacggctggaaatctatccgagggcaagccgttcaattccatgtttggaacgcctacaaaggctgaaaaagaacaatcagcggcaagcagcgtttttacaccgaaggtgacaagtgaagcgcagactcctatacctgcgaagacctcacaattcggctcaattttcggggcgtctcctgcgtcgaagcttggaaaagaaaagacagcccaggcaacacctagcaacccattcgcgaaccttccagggcagaacgcattcagcaatccattctcgccaaagccggcagagcaggctgcaaaggcccaagcaccgagtacatctctctttggtgcaagtacggcaattgacaacaataagcagaataaggacattgagggtaataaagacaataaggtcgcagctctgaatagcccattgaccaactcattcaccccggggcctaaggtgtcgaacggaccccaaacggaaggtgcgacgactgccacccctcgtgtgtcgttcgcgcacttttcacatgacaacaaaaattcgtcgtctttacctgttccttcttcttccacctcttctctgccctcctccacaacttctactgttcccaacacgttcactgcttcagaccctgacagtcttttcccaccaactgatcatcctgtatctttggactatcctgagtcaactgaagacttcgacagtatgccactcaaacgtcttttcccagaaaagaatcgggacgaactccgcacgcgagcttctttgctcaggaatatcggtgtcttgaccgagtcgttcaagcgtgagatcgtcaaatgtgaccccacaaaagagaatatcgacgatatcctcattctttacgctgaacttcgccgtgagctaggcgtccccattggatcaatcaaacccggggaaccggccaaacgtgccaccattcaccaacgcgccacatggaacgaaggtgccgccgccaaagatgctgccgtcaaagatgcgccaaatggatacgcacctcctcggaacccgacccctcccacctttgtacctcctgctcttgatggcacgccctcatcttcttccaccaagccttctggtgggtctactacttcctccaagttcgcccaatcgttctccgctccaacccctgctccagcaaatacttctgtttccacctccaatgctggtccttcgtcctcagccgcggctcctgtctcggttgctcctgtcactttggctgagccctctcctccgactaccgcccccaatgctactcctgtagccactcctaccgtcgagactcccaagcttggtgatgcagccacttcgactgccacccctgctttccaaattcccaagtttggcgatgcagccacttcgaacgccactcctgctttccaaatccctaagtttggcgatgcagtcacttcaactagtgcccctgctttcaaaattcccaagttcggtagtggagctactggcactgattttgcggcgcagttcaaatcagtgtcggacaagaccctagccgaagcgaaggccaagagaaaggccgaagagtttgactccgatgaggaggatgaagctgaatgggagcgtaaagatgaggaacgtcaacgcgagaagcgcgctcaactcgaagctgcagctaataagcgttccgtttatgtccccggcgtgggtttcaagttcgctgatgataacactgctccacaggacgttgaggagcctgctacatctgccaccccatcaacccctccctctctgttccctccttttactgctccttcaaccgcttctactaccaatggtaccccctcttcctcacaataccagccccggttccctagatcatctcctcaatcctccgaattctcaactctcgtcgggacagccactcgttcgcctgcggatgctgcactctttgggaccaagcctggacctccgcctccttccttgagtgcaggccctccaagctcctccgtcggctcttcgatattcagcggatcggtcagaaagccggttccagcctcgcagaacattttcggcaagttgaagccgacctcgccgaaacgcaaggcgtctgcggatgaaagcgacaacgacgatgattcccccccaaagaagactaagtcttcccacaacattttcggcggaccccagccgacctcgcagaacattttcggtgggctgaagccgacctccccaaaacgcaaggcatctgtagatgaaagtgacaaccaggataattctctcgccaaaaagacaaagccgtcgcctccccctccttctgcgggcgccagtatgtttggacgggcgtccactgccccatcgccggccccttcaaccaatgtctcttcacagcccgcgatggccactccctcggccacttcctcggctcctcccactcaatcgatttccaccgctactgaagatgaggacggtgaacctggtgaaatcttcgatctgacaaagggcaacagcggcgaggaggaggaaaccgtcatgttcgaagagaccacccgtattttcaaacttacgggcacctggcagcccaaaggaaccggtccccttcgcgttctgaagcaccctgtcactggacgtgcacgcatcgtcgcccgtgccgatccaagtggaaatgttatcttgaacgctcccctgatgaaacagttcgactacaagagtaactctaacagggttcagttgctagagcccaaccagaccgggggattcacgcaatgtacagttcgaattccggctgaaagaatgcaagagttcctccaactggtcaacgagatcaagacctagatctctttttatctcttccccattttttcttcatctttgttctcccttccgggggtgtatgctaattcccaagcgcatggccatggtttgcatttgcgtgttctgcctttatggttcggtttctttttgatctcttgctttttgttgttgtttttctttgtgcatcgacccctccccttggacaaagttggcccggcttcacgccgtgggccagcttcaagcccaatagcatccgcctctttccttttgaacccagtcagggcccgggtgagtatctccctgggcgccacgggcttcaagtcggacagagtcggcgcggcttcacacagtcggtctctttttctttgagcctagttagggcccgggtgagtttctccctgggtgccacgggctccagaaaacgtcggcgcggcttcactggcaatgggccagcttccagtccaatggcatcggtctcctttgtgagctctgttagggcacgggtgagtatctccctggacaccacgagctccaagtcggatttcctttttttattgaagataatggggtctacattgtatttctgtgaaggtgaataaaaattgatctttttttctaagcatacctcgtaaatacatgtcagtaaatatacatcaattaactaaatgaagtcgatcataacaaagaccctgagaccctgagaccctgcggctgtgattttcgaggggccgagactcgggtggcggcctaaaaacccgcctatttaagacatcgctcttctttccagttctctccccgttccccttttattttcttctgcttctcagctgtcactcgttaaattttcacgctcgttcaaccgtccaaaaatgaaaaccttcgctctttctttcctcctaggcctcgccagcctcgctacggctcgcactgacctgcaaggctgcgtctcgtcggaagtcatagtcgagcaatactacgccagttacatctggtacgtccctggcaccggcgagatctgctcgttcctcgactgcggcggtggtcgtgcgccgccaaagaccaaccaaccgggatgtccactatacagcggaaccgcaacgcttactcccgactacctggcgggctggggacccaatggcaaacaggctgcctctacaagcaccgtggcgtcaacttcttcggcgacagccgcgtcgaccactgatgttgtgctcgcttctgccacgcagacttctgaggcgtcggtgtcggacttgtattccgcgtcttccgctttcgcttctttttcttcgtctgattcttcttctgattctggttcttcttcttcgtcttccccgtccagcactcaagctgctgatagcatgatcacggctgctccttcttctctcgccccggtcgcttcttcgttgaagatttccacctcgtcggcctcatctaccggtaacgctacctcttctgctgctgcggcgaccagctcgcccgctttcaatgctgccactatccccgcctctaatgttgccggtatcatggccgtgcttgccgctatggtcggagttatggtgctgtaatttcaacttgattttgtacttataccttgtggaagtcggatttgtacttagtttttggagagaggagacgggcttgatttagataaatactcagaaatatacccacttgcggaacaaccccctattccttgtccatagcatgtcacaccactgtcccacggcaggagaagagtttgagccgcatcgccgatctgcacgacccgccctcttggcgagactctctccacatttgaagtcggggagatggtccgtgggaatgactcgacctgtatattctagctgacccgggatagagcctgtctgtctcttgaggtcactggtattgcaaacatggcttgaagtaaggggtaattgagtttgagatgcagccatgtcgtgtttttgaaataaaaaatcactagatgtagtacgttaccaagatttctttacttctagcgatctttagttaggaagtggaaggagataattattacattgaggtatgtacaagcagatcgaaataaccgaatctcggggacggactccgttcggtccgctgcaggcccaatcaactatattgcccataaatcggtggcatctcaccgaaaggaaacagcatatcgaggggacaatctatcatgaagttgtagtccatcggggcggcatttgttggcagggaggtttgttccagggcttcttttctccgccgatgcatccttttaatcgttaccgcgcgattggtcatccttccaaatatctccggcagttcagcagacttggggtcttgcgcaagagcctgttcgaagaatggaagttcttcttcgagcttgccagttatacgatcaacggtctggtcgaagtccattatgctttccacgtatgcgcggtcccatccgggatggtcatatagagatagctgggaaagagtgacgattgccttgccaaattgacacattatggtgaaggggaagaaagggaaaagagcagaggggagagagaggatgttttgcaaaaaggaggttgtcgcttccacgcagcggaaaagaagatccagttgtatgagaggatgatcaccgtagttaggtttgggttcgttaataagcgcaacccggtaaagatgtagctcgagcgtgttgtaatgaagctgtagaatggctgtcgttgttgtcagatcattgttagattgtgcgcgaaaacagcacaacttaccattgtgtggtgcctgactcggcatgcgagctttgagttgcttaagttcggcttcaagccatcgtatgcttagaccaagtggcgggggcgctgatgaacccgatgaagaatggaggtcggtgtaatatagtgtgtgatggatcttgtctgccagtttcatcgctcggactagctgtacgagagaagcatcggtgggatactctgcgacctggtctaggacattgcagcattcgtcggtgtatcttgtaaagcgaataatcggccccaggtcttttacacatgttgagagcctttgaagaattagcttatggccagcaagaccaagggtcatacacacatggtagtcagataataacacccaagataggttcgtcgctcttccaacgtccgaaccggagtatgagagtcatcatttatagattccttcaaataactcagagcatagttcaagttcttctggtaattcagttcttgatttaggcccaaactgaaggattgcgccacgagtaagtgcacgaatgtatcaagctgggcagtgcttcggatagcttggcgaatctcctcttccgatttgagcacatcggggggttggttcctaggtcgcgggaaacgactgactgaaacgaaccaagccacattgatgagaagcccctgaagaagatccaggctatgttctcctctcatgacgatgtgctcggccacatattctttgactgcatgcacaatttctcgctgacgtggcgcgttttggcacgcgaccattgagatattcagatagaggaatggtttctctcgacgcagttcctctgctgtgatatccgggggcatcataaggaatggaaagagagggaacattctcttggagaatacttctatcaacagctggccttcaatttcatcgggagcagcagggttctcttcaaccgtagatgatgatctcgtttctgggccgctttctacccgttctctggtatttcgttccgaggcggccagcatggcgaccatacggtctaatttagcctcaagtgcggcaacatctctactagagtgtcagcggtttcgcctgataatggtggacacttagtgaacacttacgagccacttgcgacggatttcttctcacgacgatgggcgccgggtgcttgcttttggcattcttttctcaagcgacgacaacttagaaaagttaatatggatcaagtataaaatcaactatatgctcaccgtttacaaggaccttcggtttccgggaaacatcgtactttggccttggcacaggttatgcatgccttaggatgacgggctccaacttcatccatgacgtcttagcgtacactaacaaggccaacggtgagtcggatcgagttaacgagatacaggagcagtcagatgatgaacaagttaacaactcgagtccgatgtgtctgactgggaagaaatgaaggaacggaactccgcacttgatcgcatttttattggtcaagttgtatcatagtgggcctcagctactatataaccccctttttatatcagggctatgctatgccttgccataacttcatacggattgtcaaatacctccttctcattctgtatatattcatacgtagaaagtaagaggggttctctctgtatgcctaggacgatgcaatatagcacattcgacaagtatttgagcagtcgcctaggttgaacattgaacgccttgttgtgtacgtagagcgagacgatagctgcgtcattggtgagcgtatgttctcgggagtcagacgacttcgcctgtcgtgtggtcggtgatttcgtcgttctttagcggctccatcaccttccttccatgttgccctttgtgagtgttgcaatcatctccgtcaccgtcgcctgtgaccaaactttggaccagtcaaggtagtattttcttccttgcttctcagatcaataaatgcctaagcacctcaatacctatgcttctatctcatatactaggtagttctctggcttagaacctggttggtctcatcgctgcttctcattccccactatgtttcatatctctagatgcattgctcccagcgtaaagtatgccagattaggcgaaaaatccgtaatggtcgatcggaccctaggtagtctgagaagtctcgcagacgtccataagaacttagtggcatagccgcatagccccgattgacgatttgcttgcacttatggtatttcggtatgcaatacaagcgcgttacgtcctaactactaggaatatggtggtcattactagatgctaatttctgcttggcatcatcccaattaggcaggtagggcttagggtttcattgctttgctctaagcctgcttagtaacctataaatgcaggtctgtttcccgctaatcctaactaattctactccgtagctgaattgctgtccaagggcgcctggtgctgcttggtgttggggtagttaggtgatactccgtggagatgccccaaattgggggtccctagtgcctaggcgaagggacccatagaagtggtgcttcggagtcggaattgagatatcttagtatcagaagcattgtgagcaattagcggcatctaagcagagattaaggtcgagatcacgcatattcgggtataaaatggagaaactcagtatcggaatcatatatgaggttcaaaagctcattgacatatgaataccagttagtaaatattccgtagaggatctattaccccaaatagtggaccctgggatgcttcctgggagtaaatgcattactcaatagagtgacctgctgaacgtctctacttcggatcaaaaagaggcctaaaataccactggactccaataattgaagccggataagattaccagcctatctacacggaattagtaagaaccaagtcgaaattactccaacatctccaacatcgacctcacgtacaacaatttgagcgagtaatgttgaaatctgcttatcggcgaaatagccgtccccgcaattcgcaacattcgcaacgcgcaactccgatatcattccagtcattctaatagtcccctcacctccaactcttcttcttcctactcctaatcatggctaccttcttgaaacagcccctcaaattggctcttgtccagctcgcatcaggtttgacttccaagatctgtcaatgttttcccagctgaccgaaccatctaggagcggacaaggccgtgaacctctctcatgctcggagcaaagtcctggaagctgcaaaggctggcgcgaaattgatcgtccttcccgagtgcttcaactcaccctatggcacgaatttcttccccaaatacgccgagaccctccttccctctcctcccacgattgaacaatcgccctccttccacgccctgtcggccatcgccgtagaggcaaatgcataccttgtcggcgggagtattcccgagctggagccatcaacaaagaagtactacaatacctcgttggtgttctcgccgacgggcgcgttgattggcactcatcgcaagactcatctgtttgacattgatatcccgggcaagattaagttcaaggagagcgatgtactttcacctggcaacgagctgacagtcattgatctcccggagtatggaaagatcggtctcgccatctgctacgatattcgtttcccagaggcagcgatgatcgccgcccgccagggcgctttcctcctcgtctacccggcggccttcaacaccaccaccggtcctttgcattggtcgctccttgctcgtgcccgggctgttgataaccagtcatatgtggcactctgcagcccggcgcgtgatctcgatgccgcctaccacgcctatggtcacagcttggtcgctaacccaagcgcaattattctctccgaggctgaagataaggagactattatttacgctgacttggataacgattccattgcggacattcgcagtggaattcccatctccacccagcgccgatttgatctttatcccgatgtgagcgcaggccagaaatagattttgggagactgcgaaggatttttattagaattctatctagagaatatagtctcaacttgaacattcagagaacttcattaaatcactataacagagattgaataaggtggttattgcctgaggcatcgatatccacagccacgatatcattggctgtaaatggccccactccgtccaatcaaaccccgcacaggcaagcgagaccacactgaatttcactcgaaaatcgaccgcgaactcttcttctgacaatcgatcacctccgcccaccgtcgaccaccccttcagtcagtctattcaaatcaccactccgaatttatcctctaaccttctccgcagagatgtccaacgtcaagactggcaacaagcgctcggctatcgccgatgtggtgactcgcgagtacaccatcaacctgcacaagcgagtatgttgaacacaaaccctttccctgtctacctgcgacgattcgaatacgattcagttctggaggcatatattggacagagaacaagaacctttttcctgaaaatggaatttgttacggaaaagaatgtgtgtggtgtggattggtgtgtgtgtgcatccggggtcgaatgggaaaccaatcccccctatgtcacactaccaccctcaccatggcctgcagagaaatctgcaggtaggacatggcgctttcgtcttttgtctgcttcgcgatagagacagccgagcggagatcttgaaaaagtcttcgctcgcatccacacatatccgcacccggaacacaaaagaagaattagttttatgaagtccactatggccgaaagaccagaacattcatcgcgcagagttttctctagcagatggcattcgggcggaagactgattgcaacttcttttccggaattatagtgccacggcgtcagcttcaagaagcgtgctcctaaggccatcaaggagatccgcgcattcgctacgcaggctatggtaagtttgagcgatctcccctgaccccgctcgggaatcagttcgctaacatgctcaactcaccaacagggcaccaaggacgtccgcgtcgacccccagctgaacaagaaggtctgggaagccggtatcaagggcgttcccttccgtatccgtgtccgcatctcccgcaagcgtaacgacgaggagaacgccaccgagcgtctctactcccacgtccaggccgtcaacgtcaaggaccccaagggcctccacaccaccaacgtcgatgacgcttaaatgtgtcgcttttcgttagcatctatgattccatgttccctgctggggtgtggtcggggttttacaaaaatacaaaatacctttccctttggggccttcttatacattatgtcatagtatcgtagtattccactttgattagcatgtcctagcaccaggagcaacttgacagcaggattattcaaggtcgctcaattacacctatgtctccactttcatatagtttagatcccttggaacctggaggccaacacgtgcattgttcgctcggcatacaacttacgtagactccggggccttcatgcaagtgagtactaagtctctagaaatcatcatttcctttacggtacctattgctttcacgcgatgagaaataagccgttatgttcactgtccaagttgatggtccaattaggattaggcaggggacccgtccatatacaacacctaaggtcttggaagaggattgtgaaaggaaagctagtggtgtttcttagctgatctagggtgtatgtcctagcatggagcaaataatattaacaattataaataaagtacaactaccgctcaggatttcgagtacgaagaaaggtgaaaaaatatgttgctgtatatatcggtgccgctgctttatggtggcgcccagggtcttgctcactgtattccacagcacaggtgatcactcagtgagcagtgagcacttagggtatgcttaataatgtccaaatattgctcaattagcactcagtaagcgctcaggatatgctcagtctatgctcagtctatgctcagtcagcgctcaggtcgaaagaatgatctaggaagccagggaaactgagcgcactatactaagtatgcgaacctttccatttcggcattcgtaagaataaaatcggtctcattgcgctgcttggggcgaaggtatacgtcctcgaaatcgatcttgagggatccgccaattttagttgggtgtcgaacaatctccatcttttgggtgggcaaaggatttgctccatgtgctggaggatcccaattctcgatggtgatcttgctccgagggtaaactgtgattgagaagaccacattgacctggccgttcccctgggtgtgccaccattgtatgtcatgttcaagctgtgagattcctctgatttctcgagaacgaactgttgagatcagcaaaatatacctaggtatataatctttttatctctgttttctaatcgcttcggtactaaagagcagcacatgtcacctcgaaaatttctcattgttccacctctgcgaataaagacgaccacgaattgaaccagtcggccgatgataggccatcgaaccccaacgagtccattacatttgatagcacgccatccccttggttatgattggttgcacgacttgtgtagtggcttgtattcgaagccctggctccgatgcttgcggcttcagttccccaatcattgacccaggttttaaaaaggtcatagcctaaatcctcggtcgacatcttcccagggctgtgtcccattctgtggtgaagagatttctgtagagattcaatacaagcaaccacagatggcgcagagcccacccccattgacatgaccccaaacaaccggagtccggtagataacgcattccgaagcttcgccgtgcgtgtcgagattgattgtgcaagaatcgccagcaacgccgcccgacatgcactaaattccgtgaaggacacccgggcaagacctatcttgtcatcgagcagagtgcacaggttaacgacctcaaacgaggctttcacacaatcagcttctagtatcgactttcctggtagatcatcctctatatcgacggcttctggattgtggaaaaaggaagttgtgaccctctcaatcaaaggataccagcctaggaagattctaatcaaacagcagtcgagttgcaggtgaatggtggtgcggaaatagccacttgatggaccgaggtctctgcacaaccctccgtttggtaggctggcccaccaagccagaaatgattctcgttgcgaaagtaaattgtccaagcattgctttttatggtctgtggatgctttccgtagcgatgcactaaaggagtatgagtagcagttcacttatcgcttaagcattctccttacatctcagtggcgaagttcgccaggttcgatgttaaacaaatagaagttatcatgtttgaaaagttggacgggtcatttgctggtcgcaagctagggatatttgtgggaaatgcagcatcaacttccgcaacattcagagaagtgggcttcccatgtaatatcccgatgcgcctgattttattgtcatcatgggttatcagtacacgaatctaatataactgcatacctttccagggaatacgtggtccagaataccctgttcctaatttcgatggtttctgtatcgagatcgtgcccggtgtatcgcctatgcattccattttggactgccattctcaatgccaaccctaaataggtgaatgatagaccagatgcatcgatatggataaagtaagtccccattaagaggcatgcttgaacagtgcgcagtgaggccgaagcaattataaggggcagaagtttcgacgcgaatcggtagaatttgagtcccagttcgtcttcggagaattgagtaccgcctttatgatctggtacagattggatctttcgatcagaacgaacgcaccaaggagaacccatgtgcgcaaagcgagtgccgatagccagtgtcattagcaagacgcatacagagcttgcgtcgggatgtggtaactgcatttgagccgagtatgagtagcataaatttagtgtctcgcagagctggctttgttccacgtagaaatcatttgtctgggcataattgaaaaaagagttgataagaaattcagcaacatcgcgcggagggaggcactccaacgacgaggaaatcaagcctgtttcgctttgcaatggatgcgcactccactgatccccaaataggtctgttggctcatataccttcatcaatcagttagtcaaaggggcttactgagaaatgccttttggacaaggttgtcagacaatacctctgggagtgtgttacggaggctttggtggatgacctgttgcattctcatagacagagacacataggagagctcacctgcgtactctttggcccacaacgaagtcagctcattggtgtagaagacgaaaacagtatcgcagctttgtagtaggccagactcacgtgttgtcgtgttcgactggggactgatggcaaattctgtatcttctgccaagcctattgacataatttcattcgactgaccagatttcacctgtccagtggtacttgatttgctgatttccaaagccctctctcgcagcgactgcaattcgagcgatatatttgggacataatgcttcaatagtaactccatccagtgaattcgttctctttcgtctgttcggtcaaactcttctctaaaacgtctgtgatgcatatgagcgacatctggagaagcaatagatctagaaattaccggtcggaatgtgcggcttcgaagatacattgctgtccaaatcgagaacatcgagagcaaggacgcccgccctcgcatttttccttggccttacggcaggcaatgcatctgaggatacgataaatcgtcagtgacaagctgtctaccaggatgccatcctacaagaactgcaggaaccaggaagcgggaccgtctcacgctcgagtagctcgtttccgaagttcttgtgggacaggatgccgccatcgtcggccctttctagaatcatccatggctggttatctcgtcttctagcacatgaatgatggaatctgagaatgaggatgagagttctttgttcaccgccctgatcatgagatcatgtcacgtgggaagattgtatgaattgtacctgcccgctaactcaacatcttcatgttaccatttcataagatgtttagtcaattcgttacgcgtcgcctcgcagaaaattacggaaactttcgatggggactgtaaaccaaatacagtagtggggcagtggggcgggagagtgtacccggatccactaagtgtttccggcaggtacaatcatatcatctacaatacaaagcgtgatggggacacggtgattttgaggattttaacagagtaagaggaattgaaaggcactggaattgatttgttcaaaatgaagagtgcaggacttaagtatcgtgataaaatagcggtcaatttcgacttcttaagcaagcaggtcttcgcgtctcgtatacgactcatcgacattacaggaccttgtatattgtattcgtaaatgcgctatgaagttgaactataactagataatatttgccattgaaaaaaaaaaaagcagattcaaaaagtcatacatgtaaatcaatccgcaaatcatcgtccactggtattgagcagccattgtggcatttcttttgcataggtgcctcgacatgccgcttcgacacattgcatgagacttccaaagaaaaactttcgtcctgtcagaccaggtccataatgagcatatttcccagaattagtcatgatggcattctcagttgtcaggatcgttggtttcgtgatcatacaccagcaagtgtctgtaatgaattcgacgccaaagttctccaattgttcaacccaacccgcttggctggctaagctataggaagaccgcccacatgtcaccacgatggaaacatcttgtgatttagcaaggccttcacaaaggagagccaatgtcttgatttcttttattgagaaatgcgggttccccagggagacgagatcgatggactgatgctcatgtgcactgttgagcttctgccagggctcaatcagatcttccattctaacggcgacggacggcacctggtgtgtttcgtccatgatattgctgagcaaggctgcctcgggggtgacacccagcatatgaaacatgggcgcgctagaaacggttgcaaacgcagccccaaaggctttcaaatcatctttggatggcgccaaattctgtagtccaataaccacgggaatgcgatttgcagcaatgcttccgacgtggtatcccaatatagggaaaaaggaatcgtcaataccctccacatcctggagatcaactgtcacgatgagtgacgccattctgttgatgtcaacatgcggtcctgccttaggagcgcgcccagtaagggcaatgcatatatccagataatcgggatacttcatggtcctagccccaagtacgctattggcatagacaactgcattagattctgcccaagcgacttgctccccttttcttggtgctgattgcagctgatatggcgcgcaggtaaaggttggcttagagcccatgtcggtgtatgccttcgctaattttgcggccgcttccccaaatgaagaatcgacaccttgatcacgccatcgctcttgatcgatcgagatggaattgagcgtggtaggaactcggaccttccctccccagtcccggagcttctctgcaaactgaagagacccggagcctgtataaacacagccatccacatgaacttgagtcacattcatcagttcgtgggctcctaggaggcctgccatccgcaaaacaatccgaattgcgatacgagaggcctccccgtggagtccttgaagcagttctttgtcgaaattcgagagctgcacatcctcagcaaaagagcctccgtttggctctttttggagctctgttcgtgtgtcactgaagactctatcggaaacgcggtgggagtcgacgtagatagcattccctttcattctcaacattgcccgaaaatccttcggtttcaatacgacaaccggtatggtcttcccaaaaatctcctccgagaccaacaccccgagagtgagaatatcctcctgtctttcaaaaaggattgctcttggtcctttcttgttcaggagaagttccaacatgacaccacttccagagcatgaaccacgaccactggggatagcaaggacagtatcctggagatggtagccactcaaatcgtgatgacggtcaataatctctcctgtctgaggattgactccaccccagaagctgagctctaagtcacttgcgatgagtgtgccgcaagccttgcctttcacatgagctgtaccctcaacaactaggccaacgtgcggactcatgttcgaatggagatctctgaatagccggtctccgatgaggtcttgtatgcctcgaacagtggttacttgggtgggcaaattgagtgagagaatatcgagttgatcgcttatctcttcggggtatatccgcgagggactgatatcacaatcatgtacgcctaggtcgaccagtctcgcacccacaatataattggagtattacccttgagagcagataagggcagcggatctttgcctcggaattatcacaattcctttggcttccccagttgccatctccagtaagcctgtaaacccggaacataaagagtggaaacaatgggcgggtgtgtacccggacccaccaccggctgaaacaccgaaagtctcgttggcctcaaccccggcagtacagcagtgaataggcgcaagtccgcaaaacacctatttggaccaccgccgagtattaacgctctgctcgtgtaccgagttcttttggagagttagagaatttattgacatttttctgccacatatacaattgccttaccaccgtatttccgtcaacttctactgcccgaaatgcccgagttttggaatttatcttcccttcagtccagaccgccttccgtgcacctttttctagaccgaggaataaaagactggcatcggatcgccataaaagcctaacgctgcaagggtagcaacttgcctccacaattttagctcatcttggaagtgttatcccaattcgatttgactatcacccgggccagccgcactggagataagtcctctattcccgggaatgcgtcatcaggtgatgtctctcgaaaggcatgcctccggaccgggggtgcagtggctgaaggtgtggatgtatggtacatagcagcccataacagtggagccccctggtaagatacaataacacttgatttgccataggctggtggaacttgcccgaaccatttggggattctagtgactgacgtaatgcgagaggtttctctacactccaaaacataggttacatagggttctgggatatgttctgtaatacgttcccgccgcgagcggggttttcggccgaatgcgagaaatcgcattcgcatataaaagcgcactgttctcatagctgagggattacatcagtcgagcttcatcactctagtcatatcgtttggaaagaggaaggattcactgcaaatttccataatgtgtgccaaaatactactggcgtttgatctgtatggcacattgctgtccacggaatcgattcaaagtcatctgcagatacatttcgagccagaaattgcaagggcaatttcggaaaaatggagacgtttccaattggaatatacttggaggctgaatagcatgtgtgagctgcctagaatgttccttgcatcgatagcagagctgactcatgatagcacgttacgaagatttcaccgaggtcactcggaattccttgttgcatgcacttgcggagaacggtcaatcgcttgatgacgcgagtatatcacagttgatgacggcttatgataatctgtctgctttccctgatgtcgcgccagcgttggacaaactgagccaggaaagccttttcaagccggttatcttctccaatggtagtaatgtaatggtgtcgaattcggtgaatcgttgcctctcgcagcatgccagcatttttcacgggcttctcacggcagacgacatacaacgttacaaaccctctcgactattctatcagcgtctagctgagcaattcggcaagggacttgcaaacgaagatatatggattatcagcgctaatccgttcgatattgtcggatcacgcaacatgggcatgcgtgcggtttgggtcgatcgagcaggctcaggctggaaagacgctgtgatcccggatctgaagcccacactggtcgttcatagtctccaagatgttaccgacaagatccaagcctatatcaagtgattgtccatcgaagaatctaccatgggcgaggggaccagcacaatcggttcttgatccgtatcatacggtcctcggcctttctcgagggtaccccaccgtgtttcgagcacaatttcgctcgctcgtgtttgaaatagacgaattgttgtcttttgattgatcaatatgaagattgtttggcgtcacatctgcgggctcgttcaaaatggtcaccgtaatagaagctgattggaagacgtcacatgtgagcgtagaaagacgccctatcgccgctccatgtggaagaggcttcgtaatgtgagggaaacgaataatttctcaccagtaccgctgtcttcgctgcgtctgctaccgttcctctaccatcttagtttgtcccaggtcatttgggctagatctgatactgcgttcctagaccgcagtgccaggtaacccatcatgtccagacaattttcttgtcccccttgactgtttgaggtcacctaaaaagctattatttaaatgacctcctatgctctacttgctaaaaatcagtcttggactaattcctttcattttgagctgcctgctgagctgacggcagtcctgtagagtggcacaaaattaaagaatacattacatcgaacgaataactgttcatcatgaggaaaatccaatcgaaatcactgtttttggaaatcctcgcgtatgatacgtactataggcaatatttttcctatctcatcattcacagaacactcaccaaccaatcttgagccaatttgaaacctgggtcacctcccatgtgggtctcattagggaaaagcttgacgagctttggctggccaaaatcaagaggtatcagtgtgtcttcggctggaaagaacccatcttttatcccctatcaaaatttgagatttaccatagcaataataattaccgccagggtggagaaaaacttacattgatcataagtagctgcgttgaattctgttccaatgtaccatctaggacaagggaataatcctgcatactattctgtttgaactcatcgaggctctcgtaaccccatttagacgtcagcgcaggggtcgccctgtaaacgttgttagtaattgatacaaaaacaccccaaagcaactatacctaaacgcatattcgtggtcgtcattgtgactaatccagtccgggctaaatgcttcatgcaccggagtcccttgggcgacgaccgaatgcaaacgatcagagtgggtatgtgccattctaactccgtaatagcttcccgtcgagaatgaccagactccaattcgtccggtatcatattgaggttggctttccatccaattgagcacactattccatagacgatccccggccaccgggtccgatcggttgcttggacagtcacctgttcctggcacctcggccacaacaacctcatatccctgattgacggcccattcggtcaatggattgaagtcaggccgaaattcgtcgacgccagtaacaaaaagaagaactgggtgtagtatggccgaggattccgaatctggaacatgtcggacagcaaccggaatcgtaggtccatccccattagcagcatatgtgtgatttatttgcacggaagagactggaggatcaaggtatctattaagaattcatgatcagtgcttagctaccacgccaaaggccaaaaatagagatcggggatttatatggctacttacttggcgctcttgaagtaagcatcgacctgcattctccaagcaagctcttttgtgggtataattggtgaaggatatcttgcaatacgtaagacaacagcagcacgactgtttctctgtcaatcagctccctttcccgagcggaatcattctttgcatgtcttgcaaagtgagcactggtacatacgtatacaaatctcccgcaatctgtgtattccggtgattttctgcttcctctgcccgggaaatgagatctctggcagttggaagaaaagcattcacatattcgtcagtatttgcatccgatatattatactgtagtaacatcaatatgaaaaccccccgaatactcataattgaagaccctttcagcttaccttgatcagatgatcaaatataggatcaaagtctgacacatttgcgtcataaaagggctcggcctgagcaatcgcctaggaagtttagccggaattcaatctccaataaaaaatgaaaaagtatgacaaatttaccaatggccgccacagctgattccacaagtaatcaatatttccatgttgaggttgtatgacatcaagatcctttcctaaaagccagtcactgcaagtcaagacctccgaggttgcagcactaaagagcatgctagcaacccaaggaagaatgccttttgaaaccattctagaactagatcaaaataaaaacgatgatagtaaaggcctgtagagatttactcgcttgctggaatatatcaaattgttgtctcttggtctatcttccatatataacttcacatctcgggttttcggagttaagagatgaaaatgttatatttttggggccatatccagtattcgccaagatttttcaaggcgtacagattgtcaaatgcctcggaaatagagccgggaacccatttatagccggttgctctgctaacatagttggccgacagcaaggacgtgcggctatgtacaatccctaggcattatctccgtgaaagttattcaacccaatgatgaatgattccaggaacgagtcaagccatcttgtgtccctgtttgtttctttctcaattcacttacgaaggcagcctatctactacagaggctcaggatctaatacagacacaaagaaagggaggagggagaggtcacaccagcggagcctaattttcctccctagactggaggtcgtcgacctccaacatgttcattatgtggacttattggccatcactgtaatatatgcccaactaagcaataatttccacatttggctggtaatcgcgatctatttgcggagtaataggattatgaccgggaggctactgtattgtggagcacgacggagctgccgcattaggtttactagtgacattttgattggtggatatattacggacgtaccgccaccaaacgatgccccaccactgatcgggcttaggaccttgtaaagtccgggggataaatgaccccgtgtatgagaacatgaggaatataaataagatatttctttgctctagtctctcacttttggaaccatcaaagcttctgaacattaaaaacacctattcatcatgtttgcccctgcttgtaccccaaaatcccatctcggccgttaccgtctcctcgcccccactgccagcgttaaggtcagtccattatgcttaggtgcaatgaacttcggtgaaggctggtaggtgcttgatatcaatcaacgctctctccaacgctacaattgtcaacaggaaagaacgactcggcgaatgcaacaaggatacatctttcaagatcctcgacacatactacggcaatgggggcaattttattgacacgtgagtcaaacaattgttgcttgtctctattgagatagacctaacgaacagaagagccaacgattaccaaaacgaagattcagagaaatggctcggcgagtggatggaagctcgcggtgtacgtgatcagattgttctcgccagcaagtataccactggctaccgcacccatgttccatctgagattcaggcaaactttgtcggtaataatgccaaaagtttaaagctgtcggttgatgctagtctcaagaagctcagaacggactatattgatctggtatggccactatgagataaaagaacctgttatagctcagcgtttgctaaattttggatgcagctctatgtccactggtgggattttagcacctccattgaagaagtcatgacctcactcaatcagctggtcctatccggaaaagtgctctacctaggcatcagcgatacacctgcctgggtcgtggtgaaagcaaaccaatgtgagctcacctaacctcgaccgacgaaaacacactaacaaaacccagacgcccgctaccacggcctacggcctttctccgtctaccaaggcagatggaatgccgcggcacgcgacttcgagcgagacatcatcccaatggccgcatctgaagggatgggtcttgcaccctggggcgtattagggcgtggcaacttcaaaagtcaagcgcaatgggaagaattttccaaatcaaagagccctgggcgcggcagcacagctacggatcaagaaattgcggtgtcgaaagttcttgagagtgtcgcaaagcgacacggggcggcgatgacaagtgtggcgctggcatatgtcctgcacaaggcgccttatgtaacgcctatcatcggcgggcggaaggttgagcacttagagagtaacatccaggcccttgggcttgatttgtcggatgaggatatcaaggagattgagggggcctatgagttcgatattgggttcccgatgaatttcttattccgtggagagaccaaggaggcgcatcctcgtaattcgacgcttcttaactcagccgctaagtttgattaccctgatttggtgcgtgctgtcaagcccaaagacctagatgcttaagccttggtcgtatttggattggttggccacgcggagagctggacatgtaattgaatgtcatctcaaatatagtcaaatcttgacagctacaaattccatactaaaacttcccaacccctctgggccttcctttaatctaattcatcattccgcctttaatcatgatctctgtggaactaatccaatatcgctggcttcatggttttatcaggacgaacgtattgtacttacaccaatgactagattgcgcatcaatacgttcaaccctttgaaagacaactcgtgcgggtgaggagtgtccgaagaatgctctttgtgatgggtttggctcccttttcaccttcgaaatggccaaactctgcgaacatagtggtatcttcatcttctgtatccttccgcatactagtaatttgctttgaagtctataagcatcgtcacggaggcaatcgagaaaccctaaaattctgttcggtatttaaaaagcatgattttttggctgaaatcaattcaattcgcgtgaagaccttcaactaagcacaatgtaacttggatttttaaggcacttagcttatcaatccgagaattttataactaaccaccctcctctcatttgtattaatgcaatatctctaagtaccacaggaccagttgaaaatgtaaattaaaaagctatataaccccaaagataatcaaaatcaaagcagagaaccgacgtcgaacagcaaagcatcgaacaccgtggaagccaaggcggtgagcgagagctctccaaactgccgacgtgaggacatcatatcagctctcttgcagtccgcatcaaccatcaacatctccaattccgtccgagtttacccaccttcctctttaacccagcataccgtcctctgtcagtgataccaacttaaacagcacacagatctccaccatggagtctaagatccccgacttcttgctcgagcagcaagcacaaggaagcccggagacacaaccctacttcctcaccttcgaagattactgggagcgcaaactatggcaccagcttacagactcgttggtcgagttcttccgcatgccagagagtgctccgcatcgcttagccctgtttaagacattcgtgctcagtttcgccgaccgaatcaaccagctcaagtttgtgtcgctgggattgatggcagcaacagaatgcgcaggttggtggtccacagtctagcccgaaagctcaaaaaatcaccatgatgagtgttcgattgcgttgatgtaagctaaccatctccctctagatgaccaagaacgactagctttcctcacatccctcgccaacaagacggatacgcccgacacacaggatgcatatgtctacgcgctcgctgacgtggccaacgtcaagctatcgctgaagcatctggaaggagcacagacggatctggccacctgccagcgggtgctagacacgttcgactcggtcgagactgttgtgcacgcgtcattctacaaagtgaatgcggactactaccacgtatgtgattcgacttatcctatgtccagccggacacggcactcaaactgaagctaacaccccctccaggctaagcaagaattcgcctccttctacaaaaacgccctcctctacctcgcctgcattgacctggaagaactcaccgagaccgagcgcgcatcgcgcgcgtacaacctcagcgtggcggccttggtatcagacacgatctacaacttcggagagctcctcctgcacccaattctggactcgctgacccagaccccgcacaactggctccgcgaccttctcttcgccttcaacaagggcgacctgactgcctacgatgtgctggccggtaacatcagcaagaacaagctgctggagtcacaccgggtattcctgtaccagaagatctcgctctcggcactgacggagatggtcttccaccgtccccctcatgaccgctctctctctttccaggctatcgcgtccgagaccaaggtgcagccggatgggatcgaacatctcgttatgaaggctttgtcgctgggtttgctgcgtgggtctattgatcaagttgcccaggttgcacagatccactgggttcagcccaaggttctggatatgaagcagattgatggcatgcgaaaccgtcttaaggaatgggatgctggtgttaatcagctcggtcactggatcgagggggctggtaaggatgtttgggctgcatagatgtcttatctcacttgtgttctgataagttctattataatgaatacaatggtgtcgttcttatggtggttccaatatatttttagttcgaatatgagtgagtctacatgtgatctacatgttttcctgactcgatatctacttcactcatcaaggaagaataagaagaataagacattcatagttctagaataacaaaccagaacaacttcattccgagaaaagaatctatatacacaactctccacatcccctttaatatccattaatcgaacactccaaagcagcaaaagtaggcggatcaatcccctcagtcctattatgacatcctttaggctgataatacaacttccaagtatcaaagcaatcacaatcagtcttagtaaaaatcgagcaatacccattcttgagcagccacgactcgggtttcacaagtttgctcgcatcacaactagtccacgtgaggctattagaagtccaccatttacaggtcacgcctgtctcggtgaacttgctattgaggcctccatggagcgccaagcagcccttgtcgtcgaggtattctttgttatagccctcgaggtggtagtagtcgccctggcagtttgcttggctgtatagtgtgatctcccacggtgccgtccagctatattgagacgcgcttgctttaggcgcggcttgtgttgttgttttttgggtagtagtttgtttagttgttgtagtgattttcgtggctttgatgatggtggttccggtagtgctggacttggagctggtgctggatttggaggtagcttttgagcctgcgccggtcttggtggattgctggactccggttgcctttgccttggtagtgacttcggacgtcggggcctctgtcgcccctttcacggtggctgtaggaccggcaggaggtgcacggtaaccctcgcaatataaatcggagacaccacattgaccccagaacgcacactggtagttgtcaggactagatctatacggggatatggactttacttacacatttggactcagcacatgggttcaaaccagggaggtcggcccattttgccggacgtgttgtgccaggtacctgtgggccgcaggttgcatgcggaagggccattggcatcggcggtttcccagcgctgagacaaatgaagtcgccctggtatagtcgtccgcatccgagccacgcccaggtgtttttattgaagctctcgatgtcggcctcggtgatgccgtgtgctttggcaatcagcgcacacgtatcataaccctggatgagatagacgaagcagtagccgtcgctggttggtaccgggacggcggctgtcgcgagacgcaggaagagaagccatagagcaaggaagtcgattcgaaagagacccatcttgttcttgtgtagacctgggagatacagccatttggtcgagtaacaaggctcattctttatatagattgatagagataatcgcggccgtgtaatcgaaactggatagagacgctgcatgaaagaaacagagctgtttccgagttagggcatgacgcatggaattggtcaggaacaatccaatattcatgcatgtgatgaatgtgagatgttagtattgttcaagggcctgacaaagactcggggaaatgtgtcgtatcggaagtttgacatcctggatgctttcattgttcgcttgaatcacccgtgcatgacctctctgatatagtatgcataaagttgggggcggtctttgtccaacctctcttaagctcttctagcgtcaaatgccgaatgttctttgatcgtaattggccgctgcgaagcgatagatgcttgggccttgagagtaagaatcagaaatcgagtcagttctttgaagacagggacggcgtggcaaatgaaacacattaaagagggcgtacacattcagagtacatatttgagcagaacatgtacgtacctagctacatttaaatgcacttggatgtgtatttgcattgcattggtattgaattggtgcctggacgtcagccgcagttgatatttggacttcctgctgccagtggtatccagcgcgctagtcatctttgtttctttgtcttggaagtagtacgtagattcctggactttatttattaatatcctaagcattggatcaatgcggcaaagcgcgtgacacaatgtacaatatagtaatcagaaaatcgacgaccccagcaacacgcagccaatcaaccaagccggccaccacacacaccaaacaacgacctgggtccacataccccaaacatcccaaccgaaagccgcctgggtgaggacagtctcgactgagacccccatataccagcagacgccaaggagaacagctggcggggagacgaggttgagaagcaccagacccagactggaggttgccaagcggaatggcacggagcctcgcaggcgagggatgaagctaagtggcgcgcagagcagaccaatcatgaatgaaagggagaagttgagggtggcgagggttgagagggagagacccagtaggaggagggagaaggattttatgaggtggtactgttgggggatgattggttttgatacaccgaggccgttggagagaattgcggcaaggagaaggggtaggatgatgtccacgaccacaaatatgtaggtggtagttgtgaagtactgtagattcgttagcagctattatcattgtggttgtagactggcagatctcacctgatggaagacattattaaagacccagagcgggacaaggccgagtagatggagtccgacaacaagcgagagtggtaaagcaaggtatcgttctgcgatagtattcctttcgacaatagtattcgtccccttctcttcggtgggtgccttctcattctttggtttagcacttggcttgctttccggatagtacccagtacgtatccagagagcaattgccatgatggtgaagtttccagcgatcaacatcgcgctgggcaagtaggttccaatgctgacaaaacggttggactgcatgagcaggtagaagaaaaagctctggtgcaggtgctctagcaagttgttcaagctgcgacaaagagactcaatcgtccggcccagggccatctcatcctcccatccctcgcccttggtctgcagtgtgatagcgtcgatatggtacggcatgaagctgctgtgtgcgccggtggcatacccgagaccctgcttggtcataccgcggaacatagtctgcagacgatgctcgtagctgtcgtcgtgaccccacatttcctgtagattggccccgatgcccatctggccgcctgcaatggctacagctgtattgaacaggtcgaggttagggagttggccattgactccgtcatatacaatatggagggtctggaaccggtgctcgaatgggtattcgatgactagtgcaccttgcaatgctccactcttcaaaggaagtggctgcaccgaagccgggtgcatatcgtggtaggcatcgatccaagcctgagtgccagttttactgtccggaggaattaagaagatgatatccttggaccataacgaccatcctagatagctgtcaataactcgactagaggcacgcaaccacgaaactcactcttgaagtatcttgccaatgtcaaggcaagagtgacaccattcaggttcagctcatcatcagccgtcttccacggcgcaaccagcacaatcgcctccgtggcatcaccgcgcggcgcatggataatggcataagtattctcgccctggtgcgtaatcccagcggaggtgtattcgtatttttgcgtggcaactttaaggcccgccgcttgcaagattgactgcaacttgtccgagagcctgtcgaagtatcagcgaatagtccagcctgtgcccggttcatttgacatacgccgctgtcacttccgcctcgtctttttggccgcctctcgcctgtccatcattcaacaatccttccaattctttcttgtaaccccggaagatgttctgctcgcttcccgtgaaatacgcatggacttggcccggcaagagcgcattctcggagatgtaggtctgtcgggaatactcgtttagagggaggagaagtagccagacgacaccgacgactatgcagatgaaggatacgagattcgggaggcgaacatagaggagattggggttattccgcaagttgcggattgcagctggcatcttgttagttggggtcctcggtgctggcgccaggaaggacaggtggtattaggcttctttgctcacatttcaatgccattgactaatgaccatcgggaaatgagttcccgtgccgcgaaggcgaagctgttaaatgagcggaataattggactgaactggagtcttacaagtcaacagtggagatagagctcccgttgttgatgcgcgaggaatttacgccgaacgataaagaccaaccgtgcaaattaattgtgagtatgcacacgctatgctattatccaatgtccccgagtctgcagcaatataaaaaactatagtggaaaatatacattaaaatgaaatgaagaatgcatcaataccgtgatcaggttcccactgggtagatcacaagtagctcatggttgtttgattgttgctgctgacggtggcagggttgctggttggaagaactccatagcgaccgtaggtcttctggtcgacagagacatagtgaggcagacgtcccaggaggttcaacttgccctcgatccaacggaggaccttctcagggggcacaaacaccttgagatatccgaggccaactaacgacgattagcagtgggaagggttaattcagataagggaactcacggagatagccaacaaggatcgcgcagagatgaccaaggaagctcacgttcgagatgaggatggatacaacgacacatgcgaacaggggtgaggtccaggtaggaatcttgtacgggccaagactgaagggcgttagtaacattggagcaagttttccaagtgaatcttacctgaagttagggtgagacttgtatgtcttgatggcttcagagccgagaagcaggaaaacccaaatgctggattgaagattagttaccgaaacattcaacctagtgatctgaagcttaccttgcgccgaccaccgaagtatttctgtgtaggataaacctctcaatcaagatgtaaagtccagcggggacagtcgagagagctgaattattcaacattagtcaaaaggccgcaaacgtcgcgtttctagagcactcacgtccaataaacaacgcaatagcagtcaaagtgccatgctcggcctcgaatcgctccaacagcggtgcaactgccacggcattaaagaaagcatggaagaagcccgtgtggatgatgggataggtgttcagtcggtacactagtaacaccatcaagtcagcatgcgcccgacatgcttttcaacatgaaatcaaacatactagtccccaggttgatctcgtctggaatcaaagcgccccattgcacaacactccaaatagtctggaattcgagcagccagaaggccagaatgatcagcagcaccagtcgagtaaacagcggtagtcggaggaggtatgtccgtatccgacccggattgaaaggcaacggaggtaaagcggcaggggtcgtcatgattgctgaatgatgctaatccgtttctatcactttcgaagaaaatagatatagtgacgaaaccactcagggcggccggaatagagtcgggctgacaagtcgggatataccgcgactttgaacgagaggggttgcgatcggagccgttggtaagaattgacaattattcaacagtcagatggtggatcgaacaattaatgactggagagaaagatcagttagattctgttttcctagttgatctgccaagccgatgccagggataactcaccaggcgcacgcgatcctgggtgaaacgaagacaagggacaagaaccccaactgaaaacgagtagccttccaaatgtcaaggaaacaatctgaatggaaaattcaaactcgaagagacgtcaagggagaccgaaccattaaagcgacttgttcgcgaatattacgccgcgcgataaagaccaaccgcgcaaggtgtccgggtagacaaaccccgtggtggtgatttgacagctcaatctaccccgtgctgtctaggtctattcagcacaaaatgtgtatatcgcctttgcatttgctatctatatttaaaattgtccaactaatttacaggtgctcgttaaaccaagcgatggcctggcagaaagcctgctccttagcccacttctgcttggggtccttcagatcgccgcgaacagcgaagccatggctaacaccgctgaacaggttgatctgccacggctgggtagtcttgataagaatatcctcggactcatggcgaagctgggtagtgaagatcgagtcgacctctgttgaaacgcgaaaattagcctttgctgcatcctttcaaactaatatcctgcaaacaacttaccagcagcagcgatagacagaggccccttaatggcgccgagctcctcgtgggtgacgaacgaagggtgcgcaatgtaaccaacgtcaatcaggccgggctttatgttgcggcagacgaactaaaccaatattgtcagccaggggttatgaggtattttcggagattgaatctttagatctggactatagatacataccttagccccaaagcagtagccaacagcaccgactctcttaacgccgagagtctcccgggcgtacttaatagccgactcaacagcgggctcaacgtccgcgggcttgtgcttggggagccatgcagacaagtcgaccttgccagattccatggctttgacatcgatcgcgtcgccctggagaatatccgggacgatagtcaggtagccattgttggcgtactcgtcggcgaggagctgggcgttggtgtagattccgaagatatcggtcacgaagataatggccttctcgggggtcttgctgcccttggggtgggcgatataggcattgactagaaaatgactcggttaaaaaggacaattttgggggcgtcgggggcgtcgggggcttgagnnnnnnnnnnnnnnnnnnnnnnnnnnnnnnnnnnnnnnnnnnnnnnnnnnnnnnnnnnnnnnnnnnnnnnnnnnnnnnnnnnnnnnnnnnnnnnnnnnnnnnnnnnnnnnnnnnnnnnnnnnnnnnnnnnnngggggcttgaggggcttggggggcttcgggtggctgaaatagaggagttttataaattacctccgttgatagtcttagtttcgccggcgggagtgccttcgtgcttgaaaccagaggcacagcaggcagcgggagtgttggaagccattttgaaatatgaaggggtataaaatgtaaaaatgaagtacgatatcaaatcatggatagaggggttgcttataaatgtcccttgggtgtacaatgtcgaacttagagtctttgacccatttcgtcagatattatttcatccaatccaattggctgattgacgtattactccacttgcccctacttgcccctcatggagctctttggctcctaggggtaaacctcttggaccgccgccgttattaacattctcattgcttatgtaggtactaggtacctaaggctgaccctctggagctgaggctcaatggtcttgcactgccttcgaatatccgacttgcatatatccatggcttttgcccatctagaaatgtatgagagtaagatttcattgcctcggcagtcggcatctggcaatgacggaaataagaccctaactccttatatctaccccaacacgttacaatggtaagtttgaagagataagaaatcacattgcattcatagaaacatctgtactgcatatatctgggatactaggacatccagtcccagtcaatcccaccaaccgtattaccacattagtccattcacacattgaacgtcacaaaatatcatgtccgaggtcctccaagaaactttccttcccggggtatctttctgcaggaaatattatgtcgcatgaagaattcacaagcaaaatgactccgtatatctcatgaaacaaaaaacctcagaagtgtaaaggtggtatcaaaggaaaacaagtcgcagaatttttcactcgaagcggaagtttggctgagggcgctgtgcgcgcctcacggcccaggccttgagggcaattgtcaagatctcataagccataacgaaagcactgaagcctaggccgacagtgaaggtgaacattgcgtccacgtcgtagtactccatagtttggatcacatttcgggtctagatctttgttagtcatgctcttgggggaaactgtaaagcttaattgcacttacactcatcatgaaaatcagacctcccgagattaggcagaatgcagcgatgatctcggtcgggggacgagccgggaggtacgaggtcggtggcttgagatataacagaacgtatgtcatgccgcgcgacagcgcaaatccaaccaacatgttaccccactgcttgtgtaccatagtcgatgtcatgctgtcctggtggtgcgaccccatcatcatgccaagcaacataataactaggggtggcatggggttcaaggaaacgccctgcgacctcggtggcgtccaggcttcatccgaggtgccatgagcaggggtctggaggatggtgttgttgaccaattcgcggatccaggtagattcgaaaagcataccggcctatttcaggttagtcagattgattcttataaagagccgaaaaaaaggagatgggacgtactaaaccgccgccgaagaacagcacagaaatcgaaacgtgctcgaggtctgtagcagaccatgccttgcccgcaccggataggtgctcgagaaagacatttgtcgcgccatataggaaaatgacgaatgattctgtggcttcagctgatggaaccttagatttccagccgacaatagacgccgaaggcttcttgttccaggcccagcccagatctgcccagcaaccgatataacgtccaagtgtcaggacaccgtaccagaagaaaataccacccttgatgaagtgagcaaggccgttgaagatttcatggcccctcatgataccaccataagtcacagccccagtcgcaatacagacaaatccgaatggaagaatgacacggtcaacgatattatacacgacattcaaaacgcggagaactcggccggggatcagaccagggacagtcttggacaagaaacgaccaacaccggtgtgacgaatccagccttgcggagcggtatccttcggtagttcgtcgggcttttcaaatccgtcgtaatcggtaggcgactcgcaacacgatccagggctatgaatagaagacgagttgctatcggttccctgaccactatcgcgagaccagcgatgctcgcgcatcgcaccgttgaagcaagcatgctcgttatcattatcgtccgtcgcgacaggcagaaacgcagcgtgttcataagagggcgtattcgacttattcgactcgccgcggccagcgtaggcaaagagcaaagccaggacgacctgggtggatacagcacacgtcgcaacccagccgagcttgtggtgcgcattgttctcgtagaggtctggggtctggctgttatagataaccccaagtaggacaccgaacgcgttgaaggccaggaagaggaattgtgatagaatcgcaagccgtgagcgtgcgatgctcagcatgacagctatttgagatcagtttctgttttctttcatgctcagagctcaacaacagctacttaccgacaggaagaacaaagcaccatcctagaaccataagggcaatgtgagcaataatggtgctggagtgcttgctatacgcaaaatagctcatgggaccatcggtgttagcttgcatggcggtgggtgtaggttgcggcgcgtcggtgctcgtgttcatatgcattcccatgtccattgattcatcgtccccgtgtggaagcgcggtcgcaagcgatgcgagtagtagcgtgaaaattgccgccctggcgactcgagtggctaaaggccacatcaggaagatgatgtgatatactgcgagaaataataatgtggctgtatgtgcaaaaaatgcaagtggccgcgaagtataaggctccaaccagctgaggtcgaagctctatggaatcgtgacgtagcgagcctgtcaagccggtagctgggcccgtatttattcttgctttttactcctccaagtctagacaggactactcggagagtgacgaactagactgtccaattatctgtagttgaaaatgaagctgtagggctgaagtatgcgacaccaggagggaatgcagtatataagtccaggcgagctaggaatgaagtaccgggaaacttgctaataaagctaaatagaattttttaaaaaaaatagaaaataatagaaatgagctcgccggtgccgatttccaatgctcttgaaaaaaaaaaatatggaaaaaaaagtgcgtggagaaaaggattgacgccctcacggcatgcccaactcggtagatctcatttctgcttgtagcatgatgcatatgtaggtatcctatgctttatttaaagtctaagtgtcacgaactacgttgaactatggaaattgacgccaaagttgttgatatatcgtttatgaatcgaattttcttagctcttcctgtcattcgggtgtctcgggagcgtctaagaaatgtggattttggtgacttcatgagtttgggagcctggaactatgacctatgactacatagagccccaagatccgggatatttgcaatgggaattcttgtatggagtctggagggcgcagttctccgtctgtacagcatctgatgccttacgtgtggcacgatgtatacagaaatataggcgccttggccaatgacgtagtcgatcgttactctatttggaccgtgaccgacctgatcagctctgtatgcttccgttaggccttctatgtgtgtctaggcagacataggatgcatggaataggatgagcatagcatgtgcggagtatatatgcatgcttacaatatagcttcccacccatcatcaggttgactgactacgtgcaagtctaacgttggagatgatcaccagggatctatccccccaatcaacgatagcctacggggtacgatatgaaatccttgtcaggtgtttccatactccacccatctcggcctccctcgctttgtttcccgagccgcaattttgagctggcccgtccttgtagtgggggttatagtctgatcgtaaccgaatgtcgggctctatgctccgacatacgaaaacagagcaataagagcaaatttgagcggaagttcggcaccttgctttgttgcctaaagaggtgatattgaagtttgcgccaagtactgctactctgtactccatagtagctgcccttattcccgtgggccgtgaataaaccgaaattaagaccgaggggtggtccttgcatctctgatgcacagattttgtaaacatctcataacatagtggcatagtgggactccatgcgaaaaaaaaacaagccacgatgcatatcgtcatgtggtttcctaaccatcctggtccaagcttgcatattgtgcaactttaccataccaagcccccgctgtactccattctccatacttagtacaacactgcattctactctacttcatctactcagccaacgccacaaggatccgtcatctcccagtacagaaataagcgagtgggcgttgacaaaagtcgtgccaagaccgagccgaagcccgatcttggcgattggagaaccgtatccgtgagcatccgggtacatgagaaaaggctgggctgttacatccacgcacctgcacgtccctaggatctgcgttgaacaattgctaatctgtgaaggtgagctcttatgcccggaacgcaaactccgctttacttccgagctccgagactcggtgtaagtacagatgtctccgactgacctcgtgttgctaatcaatacagagtacggagactaaccaactaactagtgcaggtcagccgtaagctgtgatatgactcatgctttgtacatggcataaccttaagccgctaccctagacgtctgatttccaatctcgactaccgcccaacgccatggctttccacacccctcctctatggcggcagtacccggctataaccagacggtgtgacctgagatcaagccattcgacacgtccagaactcccaggaatattgcctggttgagaatacctaggcagtaataatcgggagtccggcacaaattctatccgcacccggcgctgacctagccgttccccaggggtaatggtaataatcggcgaccaatgagcagagtgtgaatacctcgagatcccgtatgatcaacacggatgtaggacttgggcacggacacgaatacgatggaatggttagggactaaaggccactcgcgctagttggaagtacaaaacgctaaaccgcctactacgtcagtagcttagtgctggggattagcgcattcgtgtgcctgtccgtagaccaatctaggtccgtggcctcgttgtgtagttaatttggctcatattaactaattctctgtagattaaaatctaatctatttggcttatgatagtagagggccgttatactattgggagtctttttttggagtcattttggggtatcttttagggtatctcagtgctatagctcgaaggatgattacatgacggtgacactttctctaaggcaactaccttcaactctcagtcatcgcgcgccttctgtagaatacctttcatccgatcatacaaccccatatcttcatttctccacctgcttccattagggaaaacagcctccctaagtgtattaacacatggaactagtggctgatagtactctgtgaagtactcattcgcggatctcacaaaatccgcttcatcggctatctcgcctttcttcaggccagctaaaatccctgtatccataaagttccacctgtcatagtttgcaacagttcttcccttgcctggcgcgtcataatggatgcatatccaaaagatcacccagaagaacgattcaaggtcatgcataaaagaacgcttctcgcccagaagagagccaattgccataaaggcccttgtgccggtctttccagttgctccagatacaccgtctcgttgttctctgatagctagatcaagatcaattaagaacgacggccacgaaggattctctttatcttcattgatcatgatattattgattgagatatctcggtgaaggatccctgcctgttgcaaggactgatgtcctgtaatgcaaccctccaatgcagcaagcagggacgaatgagtgctagccttgtaaattagtttaccatagtcgcgcaggacgacacgccgatgcactcggtttagcagtaggttgctggatgcattggtattagataccttggcagcagatgccttggtaggagatgccgaacatgatcgtttattaggtggtagaaagaggccactttgactagaagagcgcttcacactggacctgcctgtattatcaatctatcgagaatgagacgctcggtccggccgttctgctctatcttgataaatcgctggccgtctttcgaggtaatcgtagggtcaaacctacattcctcctcgctcatccataggaaaccgagaatagtggacacgaactggagcctatcctcattgatatcaaaccgttcggatgcgactcccccgagacggtcaaatgcccatatccttataaaggatccacatatagtaaagcctaggacaaatcggcgtgtatcttgggccgtaagaacttccctagtatatctccctaaatcaagccatggcttagaagctgtgtcagctgccagattgctttttagctctctaggaacgatgacctgtgaccaatgacattgggtatcctttctagcggtagtatcacttataaagccgatgtctagcttacgctctactgtagaaccctttataggtatattgggctgtgcgagtggccttcgcaggtacgtcgacgcagaattgtagtctactgagaacgttgccagtttctcactcagatctgtaaaccaactcaagacatcctcctggtttatatcttttggccaatctttctacccgtcggcaaaaatcggattgctaccttcagtgcatctttcgaatatagcatcggatgctgcttgaagaccactgatatttccaaaaaattttgagcggaaatgcgggagccctacatagagacacccaagctctgacttgaggaccctgtcaacatcttggcagtattcagaggagttagcgaagctactcgttttttggagccagggggtttgttagagggaggaggcaatcgctcgagggggcggcgtagattccgttacggccacgtccacaagattccatatctcttcatctgttgaggtctccacaagagatgctttgaaaagtggtttgattcgatcaaggtcgaaatgacccgataggataagttgaagcagaccccgttgaagagttcctcccgacttggacagctgaagaccagcagcgggaagaccctcaagggctgacacgagggcgaccgcgagagattgcataactgtatttaagttagccaaaataagattttgcgatgcagtgccgcaccctcctgtgtaagctgatcgacatcgtctccacagattgacttgaatctgttgcgaaagccatttaggccatccccaataaggttttcaataatcacctgtgatcttttttgatcagacatggcatggtgctctttctgccaccaggttgactttgtggtgagagtaagagcggaataccacgtgatttagagagtggaacctaccccgatatagagcggttagacctggcacgtaacatatggcacaccatttaaagatattcacggagtagtaagtatctaaaacctatatattttaacaggggtgataaggacgctaaaaatttagtgtatagctgatatatctagaaaatgacacctaaatgacgtatattgtctaaatcaccgacgtattgttctgctattctccgaagtagctgaagattgagtgatctaaatttatactcggtgttatggctagaaggataacaattagctataaaaaagtgccaggaatatttgacggaatatctccaggagcgaagtataagtcatgtagaatgtctgcactatcacaatgaagtcattgcaaatactaactattccagttagtgtcctattgcataaatgattacctgccttgctagtgccgccgcatagagccttaaccgcatggggcgtcatctagatagatcgtctatctagccgcggcaccaaaacgggaccagtatatccgatctgtcgacacctacagccgctacgaagaattcgcgggctcaatgatcaatggtgcacctcgagaggctcacccagccaaacatcaaaagctacaccaaatccagggacaagaatagccgtgcgagagcacgcccaccggcatccagaccacgagcaagttgtacagcaagctggagcagagatgattcccagagaaaaattccgtcattgaaattgttaagaaaaaaccaggatgagggaaataacataaatcctcgtttttcaagacactccatgcaacaaccccaaatcctcccctcggagccaagatctggtttgattcgcaaccccgagacaccggacacacaagcccgatgtctattcctccattcacaaaaacatcaaagacgccatttttgagcccgtctgaaacattgctccacttgacgctaccgtagtcgagccgggtacgtagatggatttcgtggatgcgaacggttcgagaggggggagttggttttttttgctcgcttagcggtactgtaggttgagaagcttgtggttagtgttgtgcttttgcagtgtgcatgtgtggtggcagtgggggccgggaagattgtcgattatcgattggaatttcacgtcggagaatgtgattgtgtggtattcgaatgggatcggacgggattgtcgagagaggaattaaaacgaaccttggtgaaaccaatatcggtggacttctcacggaagcactgacggcagatgttcatctaaaacgatccgtattagccacacaagtccatgtcatgtcacatcttgcgatatgcaatatgctcgagggattgatatctccttacgccgtacttgcggatcagaccggcgcggtgggagcagacacggctgaaggcgcacaattattagcaagcccgttcgttttgtatcgatttttgattccatccaggattcctccaagtttcattctcggtgtcgactggatcgttcatcggggaattatagcagggtaaacacaccattcgcgggagcccttgccgtacctatcgagcggagagaaatcccatgttagcctcgtcgctctttttcgagatagtgcctagtgtgtgcgtggtgcggtttcgacttacttgcggggccggctgtaccaaacgctctcgtgagtcatcttgaggttttaaaggtgggacctgggagttgacggggttgttgacgggacgagggtcgctggcgttgggcgttaagaacagagacaggagttagggttggaatttgcgttgtgtgctgccccaatggggaatagggcacgggccaactcgcttgagttgcgctagctgtttttggtgtatcatgtgaccaatgggcgatcaccacatcttagcgcctcaggctgccagatcttatacttcacttttcaacattaatcttagctgacttttcttcaaagtgctattgatagatactttgactattattcgaaacttttcgagatacttgaattatgaagacaacgtgggctgctcttgtaaattcaatatactaggaattcataaggctatgtgcataaagccaccagtttgtactacagcgaaactgtattttcttttgaatctacgtacttcagaatgctggcatattaatagccgtaatatacagcaaaagtgacttccctgctcttgaaacagagcccttctgttgctttctctgtctgaagacctgtgggcatcttccccacaatcatggaacagttggcctagactagatatggtcaagaatgacctccacatgtcaattaggttatacgttttggaataaccaggataagtaggataatctcggggaagcaaatcagtgggtctatattgccatttagaagactgcagaaaaagtgtggtgattaacagaaagagatagcacataagcggctgcatattagcatagagagaagaatgtttgttcttgaggatgtgtgtaacctcgtgttgaggcacgtgtcctgtttgctagctatttaattagcctcagttgattccttcttctccttcttcttcttcttcttcttgccaacctggaagcttgtatattcctgaggtgaagtctcggcacttctacatccatatttcattctaatatattatatatataggttgatcttctttcctatcatccatcctcccattccaccccagctggtctcgatgaaaacttccaaccgacctcaacggcatgcaagttagccttgctgtttaaacgccgaagtcactcagaagcttggtgatctggttgactggttgactgggctattctcgagtgcattcacttcatgaaggaatcaaaagctgccgggtcttcccttcgacgtggccaggttatctagcctctggccatgttccgattatatattcccaggtggaaatgggaccctgccacttgtgcccatggccccatactgccctcccagacttgatctagcacttagctacatcggaaccatattctcctcatcaatcatgagtctgtcgatcaacccaccccttagctaccaggggtgaacgcgaaccttccgaaatgcaccaagcgagccaaagaaaagcaattcaatgtctatagaggccttttggcgatcatcgatttatatcggtccatggctaggatccctcatgccgtcctccaaggtccttccttcttgttctttcaaggtcctactcgtgtccccaaggtcctttcttcttgtcctttcaaggtcctgcttgtgccttcaaggtcctctgagtccgataaacgcgctcaactcatcacccagcacgataccacgctattcgacggcaggccttgttattcagccaaaactcaacacactttactgctcattggaaaccgcaagtccgtgcttcagagtccggaatccaagtgcttcgaaatcacgagccacaaattgaactcgacgatttcactctcaatttcaggggtcaaagatctcttacattgcgaatcattattttcagtgtgctgggatataatcagatcggagggcatatgttgatcagttcaggtcaagaaactcgaagactggtcttcatgcaaatcgcaacaaacccgagatgctgaaggtccatcacttttccggtccgcaaaacgacatggacatggaccatggaccctggtggtgtctatattttgaccatagctaagttgaggagatgttgatacccttcatccatacgatcatttaagtcaggttcgtggccagcagtatttctatcgcggccacgtggctcacttctggacgtcctcaaatatacgatcggcctcccttagagctctagagctcgacgtggccgttttacggctaccagataccgcagacgtttcccacctacgctgtcagctccgtcgggatttcactgggttacattataggacatcagtccttgcaacaggcaggggttcttcaccgagatgtctcaatcaatcatatcatgatcaatgaggatgaagagaatccatcgtgccctcgttcttaattggtcttgttttggtcatcagagagcaacgagatggtgtctcgggagtaactggaaagactgacacgagggccttcatggctgttggctcgcttctgggcgagaagcattcttttcattcttccgggtgttcgccacaatgcgattcagcggtggttggaatttctgagattggaccactccggctatggcacgttattgaccgtgaccgaatctctcagctgcccgtcgaccaggatatatatgtcgaatcagaccccctctgatatcatgcctgtgaattccggaaattgaagtccaagtctacagtaatacagcgtgatactagtatatgcgaaggaatcaagtggctatcgacgtatgagactgattaattgtgttgtaagcctaactgtgcacaaaggttctacttcttaaccttctcagcccgaagataacgggcgctgtaaaacaggagataggcgtcctggcggaggacttccgccacacctgcgatggtgactttattgtcatccatcaatacccactataaaggtaacccattagcacggacacagacgggacgagggtacagtggaacaaaccttgtcgtggtcaatacgagtgtatgcataataatgtccagagtccattgtcccttggtggacgatgaccgtagacaagtcgtagatgtaattcgacatgtcaacaggaaggttgtcctttttgaccgtgtatggcagcatgttcacagacaaagggaagtcgatatgaccattcattttttcggatgaattagaggagtgttcataacgctgtgggaaagtcagcataagatcttattccaagggagccagaactcaaacataccttcagctgcatgcaaagcataacggggagtttgcggattagcaggcgcttcgaagcccgctggggggtgttaccacacttttcgcagtggtaagcagcatcggcgtggaggtcttcggcggcagtgaagctatctaggcagccgaggagggttccagtagtggaagaagtagaccgaccgagcttgcgcttcttgtgttgaagctggacatcaagactcagatcggccatagggtcgtgggtgttagtggtttgaccgcatttgtggcacatgacgctgctgcgcagttcgccatagaacatctggtggaaaaagcactcgcatggcttatcgtagctatccacatgtccgggggtagatgagtgcagttcattgacaaggaattggaagtattcgtgggcgtcttgctggcgatatccgcgcatttcctgtaactagttagcaagttctgttgctcaactcggacctcgacgtaccttggatttctgccagccatgatgaagaagcacggctgcagagactgcatcgtttctctcggcgctgttaaactccatgaagacttcagctgttgcacaggcgagacagtccttgatcatgcatgtgtggacatcatggccacctcctaggaaataggcagtgagggtagggtcgtgcagcagggcctgcaagatagaagcttgatagcacgtttgacccatgttccagacaccacgagcgccgcggatggcgcatgggttcttgtaagcattgctcttgacgtagacctcggtggctgagtcttcggcccaaatggaccgcccatctaccatatattagtagatgtccgcgaataaaatattcttgaatcgcctaaatctcaccgagggtttcaaatttggcagaagggccacggagtctgtcgagggtgtggtcatagatgaaatcgacacacttctcacagaagacaaagcggttgcgagactcgatatctgccatgtataagtatgaaccaagttgaacagtaagaaaccattggcttacaaaatgcatgcccagtcgctgcagtatgctctgctcgtttggaactcaggcatacttctgtgcaactcaaacagtgatacttcggcttgagggaggccacagttcggaggccagtagttggaacagcaaccgtttctgtctttgaaaacggagctagcgatttgtacttcttgcagaactcctctctgaactggccagcagtcttctcgtccttggagagaatagctgcaagatgtactagcgggaggtcagatgggcacaaatgagtcacgacaattgccattcttaccacaaccatacgcagcttcagatagaagttggaccgaatcgagagtcgccatagtgagcgacatgagtatggttagacgggagagagaatgaaagagataaggtggaaaggagaaggttaggattgatcagaacacgacacaaagatatgcagtagaaacacgttaatagaagttccagacttctaccgacgtggagacaagaagaggaggttgaaagagaattcaagggagagaaaggctggttatagagagcaggtacagcctcaaggactcctgctgaatagggccagcattgcactgtataaacagacatcaacaatgtgatcaaacagagcgtaccagaacaatagaactcacgatagcaagtgaatagggacaatagtagacgaacagagggaagctatacagtccacaaagggttgcgtatgacctggttcgacgtcactaccaagttcgggataatacgaccctattcaacagcaatgaatgtaaatataaaagtctattatgcactgaatggggtcaagtttccctgaggatctcaaaagtagtggggaggttggtttgccatcgggcggtggtttttcgcctccgattgaccgataccgccggataagatcagatggcagaaggcagaagctgatcttggtctttttgtgtagggaagtatttagtgatttagtattcaagtacagagtatatagactgggttttaatgttgtacaacctccgggtgacatgatagttccattcaatggtcatttctaggtaatcataatgaatggcagatgcgccaacccactgcagtggaagctatagctaaaggtccagcccttggacgctaatagtcaaacatgcagcatgaataataaattgttcataatcaggtcattgcaggcattcaatatccgttaccgagtcccagtccctctgccccgaggcagtgcgctagcacgcccaccgcgcgcagtgcctcgtgtagtataccggctgcttgctgtaccacgagcagtgccacgcgacgttccccttaagcccgcagcatacttggacgtcggtctagaggaggaggtggtgctcgggggattctcgacaaaagttgtgtccgtagtcctgtagcgtgagaatcattagctcaagtgtcctcttgtagattggtcgcatcgccctctcgactcacataaaggtcatctcgccgtcatcaagcgctcgtgttcgttctgattccatctctggatggcctgttagcaaacccagtccagcgcacctaggtagttcccacagagagccctcgcaataccttttttctcttcttcatcctggttggcttttttgaacgagtccggaatcggagcctgtgtcgaatcagcaaccctctcgcgctcttaccactgccacaactgtcggcgacgggtctgcgaccatacctctgggaaatccacacagaatgcattcatattcaatccatagaggaaactggcaaaactctcactgaagcgcgtcaggctctcgtgcattagctgcaagtgcatgaagttggcctcgagatctgccatcgaatcggccagctcggcgaactgcggctccaaggcattgatggcaggttgtgtgtatcctgaatttccaatgctatttccatatccgtgtgcttctcgtagtgaagatcgcgagcttgggcgtagaggggttgtgggcctggatgagggtctcgggcgcgaggatgatcgaggtgcgtccatgtcttttgtatttgataatctgataggagtgctggcgagagatagtaggccaacaataaataactgggggttgttattgttaagagtgggttgttgtcagagcgatgtcggtgggttgtgtttgggattgttgatctccccggaaggaaatgtctcgcacgcgacaacttttatacttgcaatttggagatgaggactgtatttgtacaatgtagatgtattacatggacttgaacataagaatccatgcctctaattgattcctcgttctaccctacattacctataaggaaatgatcttccccgcatcgtcatattgttgattccgctcggcgctcttacaatttcttccctcccatctcccagtgctaagacctagtgctcactcataccaccataacacctcgatcatactgcttatgcgtggcacaatcctacgtcgtctctatccttcggccaagttccctgtcgcccggtattcattcgcgcgaccattttctacgcacccagaaccaagaaaggcttcatctttctggacccttacatttactctcgctgttgtcggaggaggcgcttggctccaggacagatacttcaatcccaaagacacaatcactccgcagccccagctgtctcaagaacccttcctcggagtaatcgatacgctcgcgacgatgcccgcccaactcgcccccggaacagttgggaacctcactccggagcaggaagtgaagctgcaagaattctgggtcctggcactcaaagtcttcggcctcacattcgaagaactcgaagcccccgtgtctgccgcccccagtgaagccccaacacccgccccagtccaggataagaagaagtccaagggccggtggggaatttggagccgcggcgacgacgatgagacgaaaagcgctcccagcagcggcgccggtaccagcatagcttcaatcagtctcgccgacggcgacgacaagtacggccagtccaaggagttcaagcaagcgctggaggacatgaagcccgaggagatccggacagcgttttggaacatggtgaagggcgacaacccggattcgctgctacttcggttcctgcgggcacgcaagtgggacatcaagaaggcgcttgttatgttgatttctacgatgcgctggcgactgctggaaatgcatgtcgacgacgatatcatgttcaacggcgaggcattggctttgaagatgtcgcagggctccgatcccattgagaagaagaagggtgaggacttcctgacgcagatacgtctcggtaagagtttcctgcacggtgttgaccggactggtcggccgatctgtgttgtccgcgtgcgcttgcatcgggctggtgatcaggagaatgaaggattggagcgctttactgtttatactatcgagactgcgcgtttgttgcttgcgccgccgatcgagactgcggtaagtattccggtgtgcggattttctctcgggagctgactcttcagactattatctttgatatgacggactttggtatggccaacatggtaagctttcgtctctacgtgcttgacactatactgatatctccaggactacgccccggtcaagttcatgatcaagtgcttcgaagccaactaccccgagtctctcggagcagtgctcatccacaaggccccttggatcttctcaagttcgtatcctagcaccatatataaaacccctttctaaccaaaccaggcatctggggcgttatcaagggctggctcgacccagtcgtcgcagcgaagattcacttcacgaagaaccgtcaggatctcgaacaatacatccacccaagccagatcttgaaagagctcgaaggcgacgaagactgggaatataaatacgtcgaggtgccggagaacgagaatcccaagatggccgacaaggaaacgcgagataccctggtggccgagcgccaaaagctcgccaaggagatccaggatgtcaccgttgagtggatcagcaccagcttcaaaaagaagaccgacgctgcctctgctgccaaggagaagcggaatagcttgatcgagcagctgcgtgcgcaatactgggttcttgacccgtatgtccgggctcgctcgctctatgacagactcaatatcgtccagggcggtgggaagattaacttctatcctggcttggagaagggagcagagacatcggcataagctacgcagtacatgagtcgcggtacatgagtcgcagtacatgagttagatagtgtcatgcttacctgctaactatagagttttgatttgcatgtgtgtagtatacacagacttggcttttgttaactagaggatatatgaacatttggtatacattcaacagcagagccctgggtaaatccaaccgggtcctacttcagaggccctacaactcttccttcagaagaacctatgtagttcacagcgatctaaatcagaggcgatccaaatagagataactcagtttcattgttcttgaattcattgtcaccaaaaccaaagccgtttacatcttcgactggatctcctcgtgaagagccttgagcttggccatatccgtctcctgtgtaggccaaccaatggacataccctccttctcgttaggcttgggaatctattatattgtcagtgtatattcaaaggcgatttctagcgtaggaccaaaaattcgaaagatagtagagcataccatgtggaagtggacctatgagagacgactggttagcacggcacaattattagaggaatccccaactgaaactcacatggtcaacgacctggtgcgcaatgcggccattgttctgcaggatattgaaatcctcggcgccgctggccttggcaatcttcttcgcgacgggctgtgggcgtacatcttggttagctatccctgttctccaatccaattccgggtctctagggaccttgcggggttgcccccaaggtccccgaagatatgtaatcgaatccgatcggaccgaagacatagactctcctcttcaccctcttcgttgtcctgggttgttctctcgacttaccaagatctcgagtaggtcctcgtcagggatatcggtcaactttgcgccgtggaacttgggaatgacaagctgcacatgctgtcagtttggacttttcttcttctcgaattatcgtgcttgaatcgctggagctatcatggcagttttggcaacttcgctccccgccataatgaacacgccggatgcggggaagaggggtaggaagtaatacgcaccgcatggccacggctcagcggctggatatcgaggaaagcgaagactttctcgctctcaaagagcttaaatgaagggatatcacctgtatagccccaaggaagcaggtcagtcaacgcatattctgctatgacgtgtcgactggacattgcgatagagtacggagtagctatagtgtgaaatggacatacccttgatgatcttgcagaatatacaggcagcggacgacattttgtaaagctttaaaattggaaggtcttgaatgatctcgaagtgaagctatgttgtaagcgttcaatttagaaaaaaaaaaaaagaatatgcggggttgcggaatgaatcgaccgacgaggatcgaactccgaccgttcccgtgtccagaccacagccaaacttagcaatgagggtattataaactaagtccacgaagcagattcgaggagtgggacaagttagtgcagaacccatttcttgccttttaccagagatggccgtgatttgcccacaaaactcctcttataaatctttggaaacacaatgacacagctgtcattttttttcttttgcttttgcttttgcttttgctttttaattatttccagcatacgtagaaaactttgatttgtatgtaactgggaaatactgctgtgcatactccgtaacgtcggtccgtgtagatagtgtatagggttgtatccttaagcagctattgacgacatgtatgttgttgctatgcagttatctatgttgtatagcttccattcctcctagttgcaatgctgtaaactgttatttctatgggttcgacttgatatctctagtttgtcctatatactccgtacaatgaatggcttctagagctaccttggcaggatatacatccttgaacagccctagttacttatacgtactagtgaataatgtccgaacatggatttaacatgaatagtagatagctaacaagagccaacccactagctataatttcattgtatatagaaaagtatccatggatacaacatcgattcttatagatatgaataaagcatggggaacatccaatcacagtccaggtgttgtcagaccaaaacggggattttctcctatagaggtcgtagatatactaactcatagctttcagtaaagataccaacttcaaatcaaatgaacaaccagaagctatcataccagccaagcccaagaataaaaaagaaagacgacaaggtgatttgttaaagtggtggtccgtactcccgaatcaggactagcgcaatagtcccgtgcggttcttcccacttgacgctgcgaaagaccgcacatcaccacgccctttggcaacactccgctccaattcgctggtctcgagagatatacccagccagagaccatgcagaagtctcgcactatcaacactgccctgggcgcccggccttttgtgccagttccgcgggtgcagccccagttccagcgcaaccttcaggatgtccgcatcacccggactggcaagcccgttataaaggtccaaggtggccggtaagcgatcaatgaagctgtggttaactctaatgtcctgcttactgacgcgctcttctataggtcttccattggaggtagctaagccgttccaattcgatgctacgctcgatcccgatgtgctcacgcaattctaggtcacaccgcgacggtctttggtgctactggtttcctcggtcgctatattgtcaacaagcttggtaggttgaggtctgatgcactgcaattggaccgtagactaatagtccgcagctcgccagggatgtaccgttgtcattccctaccgcgaggagatggcaaagcgacacttgaaggtcactggtgatcttggcagagttgtgttcatggtatggagccgtattacgcatatttgttgaatgtggagtgtctgaccctgtataggaatacgacctgcgcaacacacagtccattgaggagagtgttcgtcactccgatgttgtctacaaccttgtcggtcgccaatatcccaccaagtgagttatgtgtggtatacatgaatgaatactttctgacgacccaggaacttctcatacgaggatgtccacgtcgatggtgtcgagcgtattgccgatgctgttgccaagtacgatgtcgaccgtttcatccacgtttcctcctacaacgctcgccgtgactcgccttccgagttctttgccaccaaggtcagcatatccactggaatacaagagcgagagtgctgataatgtatagggatggggtgaggagattgtccgcaagatctaccccgagaccacaatcgtgcgacctgcaccaatgttcggtttcgaggacaacctgctccacagattggccaagatgggcaatgtcttgaccgccaaccacatgaacgagcgctactggcctgtccacgtaagttattctcccggctggacaagctattgaactaaccctctaggccattgatgtcggttccgctttggaggctatgctgcatgatgacagcaccgccggccaaaccttcgagttgtacggccccaagaactactccaccgccgaaatcgcccagttggtcgaccgtgaaatcatcaagaagcgccgtcacatcaacgtccccaaggctctcctcaagcccttcgcgcactacgccaacaagttcctgtggtggcacaccctgtccgccgacgaggtggagcgcgagttcattgaccaggtgattgacccgaccgccaagaccttcaaggacctcggtatgaacgagaccgccgatctggccaacttgaccttccactacctgcaggcctaccgtagtgcctcttactacgatctgcctccttctacggagcgtgagcgccgggaggacaagcggtacgtgcatgtgctggacgaccagtagtttgtgtttttaatgtgtaaataagccttcctagacccaagttgatttcctttgttggatgagtgcatagtacaagtagactcgtagagaagcttaagtagagatgatcactcgccaatatcaaaaacccaattccccagaactccccgcacccgcacccgataacatcatattctacctccaaaccttacctacgtcttaccttcttcaccttcagcctcatactcatactcactccaaaccaaacccacaatgcctccaacacccatcctcctcctaaaaacaaaatcctccccccaagatggctacgaagagttcttctccgcacaaaactacaccccaaccttcatcccagtcctagaacaccgcttccacaaggacaacctcagccaagtccgcgaccgattcaccagcggcgaattccacaccgaagccccaacccctcgaaaatacggcggtctaatcttcaccagccagcgcgcagtagagggtttcgcgcagatgatcgaagacgaacaagacggtacataccacacacaacccaatccaaccagactccaacacactaacaccaacaaatccagtccaattcaacaccccatcttccccactaaccctctacaccgtcggcccagccacagcgcgcaccctcacaaccctccgcgacaaacacctcccacacgccagcatccacggcgccgaaaccggaacgggcgagaacctcgcgcgcttcatcctcgagcactacgacgccctgcacccgacgcacaagccctcgctcctattcctggtcggcgaagtgcgcagggatatcatcccgaagacgctgatggatgaggcattgccggtgcagaagcgcgttggggttgaggaggttgttgtgtatgagacgggcgtgatggggtcttttgagggggatttcgcggatgtggtgcgcaggtcggcggatggggcggtttgggtggttgttttttcgccgacggggtgtgaggctatgcttagggttcttgggttggggccttttgctgggaatggaacggggaatgggaatggacaggtgtttgttgctactattgggccgacgacgcgggatcatctgcgtgaggagtttgggtttgaggcgcatgtttgtgcgccgaggcctagtcctgagggggtgcttgaggggattgagaagtttatgagtgggatttgagggatggggatctgtataactatgtattctgtgtataactagatgtaaaatggaactataagtatataaacttgggaataggactagcagagatacagcaggtagcgttacggagtcagctattttacttaaatactcataatcacatttcgagttgcctgctatctctaacatgtatcaaatcacgctgtcaagtcaaattgcgtgcagaatagaatccagtatcctccctcaacttaatatcatttggaaacagtcaagtcgatttatcgcatgatttcctcatagatcaagactgggagaggttagtaaatatggaagagaagaggaaccagagacaaataacttacgcttcaactgctccttactcagagcatccttgttcttgtcgaaatcgaagaatccatcaggaatgggcggtgcggtgggctcgtcttcgggatcatggtatggctcaagataggggtgcttcagggcttcctcaacggtgatacgcttagccgggttgaaagcgagcagcttctcgagcagatccagagccgtgtcgttgctcttggggaagagtgcgcggaagggaatcttcttcttaaaggggagggagcggatgtattcgcgggcgcggcgggatttaatgccgtagtaatcttccattgtgggtgtgccgaggacatccaggatgagggtcaactggtggtgatctaagtgtatgttagttctgttactcttgaagggaaagtggaatcgtacaatccttgccagggaagagaggctttccgcttagcatctcagccaatatgcagccgacactccacacgtcaatagccttggtgtattctttgaatgtcaacatgatctccggtgcgcggtaccaacgtgtggccacatattcagtcatgaatccagagttatcatcagtggaagcggccgagcgagctagaccgaagtcgcagactttcaggtcgcagttggcattgagcagaagatttgagggcttcaagtctcggtggaggacgttggctgagtgcattgccttaagcgcacgcagggtctggtagataaagtactggcagtgatcatctgagagatcttgtgtgcggataacccgatgcatgtctgtttccatcagctcctgcatgctgttagtgaaccatatttcatgcatgcacatctcagacagcttcaacgtacttgaatgagataaacttcattgaatccctcgtagttgcggggccgttgaatatctaggatggagataatgttctcgtggttaaagtagcgcaacaacttcatctcgcgcagtgtacgcaagcagaacatagaatgatcgaatggcgtgatcttcttgatggcgaccttctggccggagggcttatgaatggcagagctgtacgaggttagaagagcattgagaagaaatcacgtctacttaccagacgacaccgtaggcgccttcgccgataacatcttggatttcatattgatcggagacattgaaggagatcttccgggatcctcccacgggagggttctgctgacccatggcgagaatggtttctctaatagattcagccttggggtgattgtcagctttgaacatccttgggatccagtggaaaaaaggccgaacacagtccatggttaatgaatgagagccggggattgaaaacagtagatggggatggcgcacaagttggcgattcacagtccagggaatgaaaacaatagcagaggtcaatcgctcaaaggcaagcaactcgaccgcagtaacgcgagggaacaaacgcaacaaacgcaacgacaaagcagggaaaccgggatatgaagcttactttcgtttgcgctgtaatcgaattggtttgaaaaaccgtccaagctactgcctggattggatttcaagggtcggcgagactcaggggataaaggcgaggtgtagaagagaggaactcggtcgtacgaagctccgagcggggaagatgtgacaggtacggagtacagcgtctagacccacgagaccgggggggggggatacgaagagcacaggtgtaggtgtcaggtcggatcaggtatcaagctcagagtctaagaacgtggcatgtcagtgggattgacggtgatgatgctggagcgcatggagatgagccaagccgctcggaagcggggtcattctctcatgcgggatcacaacgggtctggactgcgactcaccttgggtcgccttttctctacgaaggcaaagggagatagagaagaaaggagagaaggatgaggataggtgaacctggagaaacagcgggccgtaggggaagtggtggggcagagagctttaaggcggctccggtagatgaaacaaagtggttcaggatcagaacacgggaattggggtcaattaagaaggaaaccgtgagagggagcccgggtgagcgacgatcccagagcgagcggagtgaagacgaggaggtcgaggaagagaagaagaagttggtctgtcgctgttttccccctggcgctttcgctgggttgatggccgtggaaccttggatcaccatcaaagtgtctccaccagtacctgggggtacttaatttatctacaagggacccatacattgacaagtatcccccatgtacatcccaccacagcgatcctcagatctccgccacggcgccaaagtctctcgcctgtcacgctcgttggccgctggacggcgctactgcaccggacgaaacttgtcacaatcaccttttcccgctccaccaacataggaggtgctggtttcatcctgattggagaatccaccactcctagtttcactagtcacaggggggtcctgttaattgggtctgagacactgaatctcaggtaaaacaagtatacggagtaggtcatgcgcatatggtgaggtcaatggactccgattgtaggccgtgtgattctcctcatcaggcctttcatgaggttacttatttgtttcagggcttacgcttgagcatggcgctaaaatatacactcaaaatagaaatgtggatgtggattctactaatggtctgatatatatagaccatcactatgttcgggtcaaagcttacttctagaaataaacttgcaagttggattgataacggtagcagcggcctaggtttaattggagtgaggagaacatgatagcttgcaacagaagacaatataaatatgggcctaatcatggttgatgctccatcagactgtagttactctacatacgatgggagatccaccatcgcctgctccagcgtctcaaaatcagcgaacgaaacattgtatcggagatgtcgcttgagcagttcatgggcgatgaaacgctccggcatgttcccctgtgcatccaggaaagagacccggggattggtattgctgattatctgcagctcgttcgcaagacgatggtgatttggacactgctctgcacctactaggaagatcgtgacatacacccaggacagaccaagaagatcgagctggaattcgttcatgtctggtgcttcaccgtcgaggacgataagcagtcgcagtatgggtgtttgtggaccggcttgccatccgtacataggatggtaaattgctgtccgagagtgcttttggaaatggagttccttggctctttgccagcctagcatcagtcgagtctcccctccaaatctaatgtttggccatatttgttcgaaattctggtggttgatgtggcccatgtagcgggcctgatccgcgaatgtgacgagctggtagcctcggctatcatggtcgtgattgatcattgcttgggaaaagcgacgtacgatggcctgggcaatatctatttattgaacttagtatctgatatagactggtcggagggtgatatcacctttgctcttgggctgcttagaggcggaataacctgtaatgagatgctcattatgattcgggcgaagcggtgcagagttcatagattcagagacctctaacaggatcatagtctcgtctagaggagctgccggctcccgtaagggtctgaaaggagtcataacctgcttcgagtaagtctcggagatggattgagccttgcagatatcatcgcgagagaagtattccgcaggtgttccaattgcggattccatcctatatcgagccatgttcatcgcagagatgacatcaggcttcatcttgtttccaacaatgccctctgtgttattgctgacccagtatagacgttcctcggcgagatctttgtatcctctccaaccgggagtgactcctctccacccaccaactgcgtcaatgctcaatctgagcgggttggacgtggatttcgcccaatcctctgggataggctcgaaatatcctgcccggaggaggtggagatactgaattgggcatcgggctcgaagatcggcgatcttttgacttgtcccggctgtttcttggtacactatcacgagctgtcgccattcttgatttggccacctgccttgctcctcctctaggatggccatgcgtagctctctggtgtgactagctgctttctctgccttctcctctggcgtcttcttggataacatcttcttcaaactgccaaatgccgatggcttggagctctctatggggggattttctgctggttgctgggtattaggagaagctgtggtgtcagcctcattcggcacagaggtctctgggtcttcgctatcccatatggtagatgctggctctttggaatcaatgacagcctgtgccgcagcattgagggttgcattcaactgtaccatcctttgaagatgctggctgtagccggacggagtaggtttcgccttgttgtaagtcccgggagttgtaaccggaaaaggcgagggcacacggctatatgggtttttcatgatgagagccgacgaatgactatcatgataggctgattcacctggtcgagaaagaaagtgagaccacaacgcaacttatatcgtcaaattggcaaagctgacctggatagatgactgctttggaccatatttcctgaatatgaaggcgggcagcctttctgtctttgtatttgtggacatcgcaattacaattataaaactgtgtggtatgctctggttcaatatccttattgaaaatgcgacaggcctgctggatgccgtgtagggcggccttcatatcttgctatcagagcagacaaatgttagcactttatcaagacgaaagtattctatatcgtacttcatctttagagcggacctcggcagcttcaataaatttattggtgtgatggtgtgcaagctctcttatcactgaacgtgcatacggtggggggcagttccgtatatcaacctcggcatctatagtaggcaaacttggagttatagcttcattttgagcctcataataccgactaatagcatcatcaatggtttccgcgccctggaatagatgtgttagtgtaggaaaaaaggaaagtgattgaatgtcttacctccaagaatctgagggccgtcccttcattagcctctggagcgatggaaatgaacttcgctatgtcatctctcgaaggtaacatggtgagaagtactgaaagaggtaaactaggggtgaaatgtcaaatggggggtcgccagataggaaagtgcagggatataatctcgttactaccccggtgcgttagtgcactagactactacccaagcatcactaaacctgaattgggggcgtgaatgggaccgagcactctcttttcaacaattagaccatttgattcgattggactggatcaatttgctaaaaaccatctgaggtgccatccctcccatggatattctcatgattgcttcgcttcgctccgcaataaaatagtggaaaaatgataccgttaattcttcatagatgcgatcagcgtctatcgcctgtcaactataactcagcgatctactagtactagataatccaaacatgcccgccgtgatagaaagccaaacgcaatcttcccaacgtaatggtacaggcgggagagctcgcgaaaacacgaatttcatggtcaaccgagaccggccggtcagctccacattactgcacgacctgcgagcaaatcgtcagtgctgaccgatactatggccagagcagagggctcaaaccttctcttgcaaggaacccatccactgatccaagctgacgctttggtcggcacggtcctccaccagcatcgtctgagcccagagacgcagaccgggttcaccatcttcgcgaacgacgtacaggtgaggcacgataatgctgcccacacccttggcccggtggtcccgactcttctcaactacggcccgcacacgctggttgaactcgttctcgacgtcggggagggtttgcttgcccacccgcaactgcgacttgtcagggacgccaaagacatcctcgatgagctgcgaaacagcatcgcggccaacccagaggaactgggtctggccatcgtcgatgaggtacaggccgtaaggcacgaggcgagccgaagacaagttgacagcagggggcaagaggatttcgccggtctgtggatcaggcacacccgcattgtcgggcatgtcatggagtgagtacattctcgggtagatatattggatgaggagcggcaggggtagggtcgagagaaggcagagagctgcggaccgcatgtccgtgggaatctgggcggatttgcgaagaccaagctaaatactcgattagtatagaacagctatcacaaccaaagataaaactcacgttcttgatcattgcaaggaataggacaggcaaggctcgcaagttggcagggaactggaggccaccgccgctaacgctaccacctgcgagctccttgcggtaggtctgcagaagctctacgatcttagcctgaagagcctcacgagcgggctcgagaccgctgctcaatgtgcgctcgacagccttgtggctgaagaatgtggcaatggcctgctggtcagccgaggcgaagacgtctgccaggttctgggtcgttggaagcgccagggtcaagacacggatacgacgttcaccgttgcaggtagtgtggaggacagccgcctgcatgcagacgaccggctttgtaactgtctcatcaatggccacctcgaccacgtaggcctggtcacgagggaaggccgggaaagcacagagatcggaactacggttaaagaagttgccgtaaaaggtgctcatacgcagaccggttgttgcgcgcacgcggaggacggcctccagaccaatctccgaagagaggtagtcagagaactcacgggcgaacttcatggcatcttcacttcgtgcagcgttccagccagggtagaagtaggtttgaccaccagtgtagcggggcaagcagctcaacgaggccacatcttggtattgcgatgagaagaggaacatatccacggagacttgtgattttgaacattcaactgcaaagctcttgtagaaagagtttgcggtttgaagcagactcgattccttgctggtgcccagcaccttcttgtcttctctcatagtgagcgctccgtgaccagtgttaggcaaagatgagctcagaacagtcatctttccaccaacgggggagatcaacatgtaaccagctcgcaatgccgcacccatggcgcagctgttgttttgggtgttctggaacatttcttgcagcttgcggaggaatatctcaatgttctcccggcattcgctcagcgtcaccaggagatcaccagggatgggaaggaaaggctcgtccagatcactgacaaccaacatccggggctccgaagactcggaatcgtctcgaggaatgctgaagtagtgcaagcttgagtccactgcaataaaaccgaggcgagtacgccgatctgcgttcgggatacgatcgaggctctcttggatggtgcgagcggtagtggccaaaagaccgttggtcaccgatgcataacttacatcgatcaagaagaggtaaaccagcggttgaggtggtcggaccatgtattcctgcggcgcaacgaattcgaccatgctgtggttgagatcggcacggagctcacggtcggcgggcttttgcagtgtagcatcccaatcgaaggcttgtggcacgtcgttcgtcaggttgcacatgttacaacgccagcggtggccatggtcgaggaaggtaacgaaggggttgatataagagcgacaacgtcggcatcgtgagatgacttggtctggaatcacagggatagggtcctcggcgtcgtgaagagaagcatacggttgaatgacaagggcgaagggcaactttgatttcttcaggagtgagttggttgtggggacagcgttgagcgtagatcgcatatatttcgtagggcaattggcttccgacgggtaaacactggtctgtcgattgtaagcatatcaaccatatgcgcaacatggcatctatacgtactcccgggggtaaaataattggaggagggggatagtccagctcagcgacgttgaaaggttgggatcgaagatccgtggggtaaagctggttgagctggacttgaggtcgcataggggcttgggccacgggctgcgggggtggcatgtgatgaggctcgctcatgcccattccaccgaattgctgggtcatctgcgagacatctgcggaaacaggtgcgccgtatgctgcgggctgcatcatgttggggtccgcaccgtaggcgggttgttgataccctacaacttggggctgtggaggataggccccgtaagcacccccagccgtgggttgtccacctagcgcggcattggcgccagaaccgaaatcaaatgcctcaccagcgtacgctctcttcttctttccgcctgcagctggtgcgggtgcgccttgcccatataccggggattgtgtgggttctggggtgccgtaggcgggctgggcatagccttcctgaggggggaagcccccttgtggtgctgccattagagtcgagtagattgtgtttagtcgcacttaacggttgggaggaaaagagggttgcgcttgtcacgaagtcggcgggtggaatcgatgtgaggagacgggtggtaacagctcctggaaccccacaatcagtttctcgtcaacggaacagggtgaacctggttgcgtacggggtagctgtacctttagaaagcccagaagtatcacaaaaggcagtagcgaggcaaaagacagctcaccagaagaaaccaagggagtgtgggagaggcggtgatgatggtctacggtggcctttaggtcgtggcgctccagccaatcagagttcagagaacatgtgacgagaggtgtttttatactgtacgacaacatttgatatcgagtacgagaccatttagatatcaatgctgggatatttgcatatgcagatatatatgtactatttactgtcgtcgagctgacctatatatgtttctaagtatctgggctggtcagactgaacacctaatccctggtccaagcgtagagcacatccacagattctcctgtactgtcaattatgataatgagactacgcgatttgcaagctgattactttgctaaatttgtaccggacaattagatatccccattgtggtgctcgagtcttaagaatgtactagtatgtaagatgtgttgtcgaaagaggcggttgccctgccaacactaaccacatcggctgctgcacacgagaactcctccacacgttccacaaccttcagttctgcatacaccgagtagttagttttgtttctttgtttttagggggaggaccttattgttcttgattattgtctttttttggctttacatttcgttctagccattccttcagtttgttttgattggattgcatcgcatccctgacgaccaggacccagaccatcacacgacaattgaatgaacaccccgccacaatgagtgtccgagttgtcgcgcgtatccgtccccttctcaagtccgaacgggaggccgatgtgatcgttcgtacaggatcttccgccatcaccgataaatcacgccagtcaatcaatggcgacaagagtgacaagagtgacaagaaattggcagcattgagggacagagataatgtggttcgaattccgaaccccaagaatgagggggaggagtatgcgttccagttcaatggcgtgtacggcgcagaggtatcgcagcaggagctgttcgatgctgagggtaagttcttgttttaagctcatctggtctgcgatgggtcagtatattgatccggttcacagtgtccccaacaattaagcatcttctcaacggattcgacgtgacccttttcgcatacggtgtcaccggaacaggcaaaacacacacaatgcggggcgggaaaacactggctgaccggggtgtaatcccgcggctgctcagtggaatctaccgacgtagccggaagattgaaaaggacagcgagggagagacgacagtccaggtcgccctgagttattatgaaatctacaatgacaaggtgtacgacttgtttgagccgcccgagaagcgcacaatgtcaggtcttcccctgcgggataatggtggcaagactgtggtttgcgggctgagcgagaagccgtgtaccactttgaaggagtttgagcagctttatgaccaggctaacactaaccgttccacctccgcgacaaaggtatgataccacgccgaaagctagggcccatattctctcgctaaacatacaacatagctcaacgcccattcatctcgatctcacgccgttctcggtgtgaaggtcaccatctcctctcctgacaaggttcgcgtcagcactgcttccgctattgatctcgcgggatccgaagacaatagacggacggaaaatgacaaagagcgcatggtggaatcggctagcatcaacaagagtcttttcgttctggcacagtgtgtcgaggctatcaacaagaagcagcaccgcatcccgtaccgcgagtccaagatgacaagaattttgtccttgggacagaacaatggattgacagtgatgattctcaaccttgcgcctgtccggtcttaccaccttgacacaattagctctctaaacgtcgccaatcgcacacggaagatcgaggtccgagaggtcgaaaatgatcccatgttcaagggtccggcccggccatctattcggccatctatgggtacgcggcaacctctacgtgcactgactgcttctgtgaatgtaaatatgccggcgcctgctgcgaaggacaccgcagaaaaggaagagggcaaacccgttaaggcattcagcgtatactcggacaagccccaacccaagcttatcagccagatccgaaaactggaagcaccgaaacgcacctcaatctccaatgccccctccggccttccgtcattgaagcccgcccgtcagcccctgggtgtgcaacccaccgcgcgtcatgatgacttctcggctgctaggattgaggagatggttgagaggaaggttgaggagatcttagctgtgcgggctgtgagcgaacaatcgcggcagacacaagtccatgagcttaatgagcagcttcaaaagcgattggagcagttggagcagcgcattgatggcacagaagatgcacgggctgagggtctgtcatacctgctgatggctaaacaacatcaggcacatggtgaagacgggtcagccctgagaatgtaccagctggcagctcctcacttccctcacaacgagaagctggcagccaagattgctgccttgcaggaacgggttcatgcaaaggcttgggaagagaaacccgattccccgcccaaggggaggctgggtagcatgctctcccttaagaaggacgtaacacaaaccctcggcaaacgccaagcagagactcatgaggatagctatatagaccagactcatgccggtttctcgagtggcgaggatgttcttcgccaaaaacataagaagcgtgctgcagccaagctcggccaggtcgaggaagcccccgaactccttgacagtgaggacccatccctctctccccgaactaagcatattctttccatcatcaactcgcgggacgtgagccggatcagattgctcaagggagtgggtgccaaaaaggcagaggctcttgttgattgcctctgcgagatggaccagcctacagtggatacaaccgacagcggagtcgtctcagaccagctccaattccaggtcaccagcctggcacaactgagccagctgaaaggcgttggggtcaagacggttcagaacatgagacaaggggtattggcttaattaattgttgcatcttttggcggcatataccggagcataacggtgtttctctcttcttttttttcatgcatcatcattcagcgacggtgctatggcgtttcctgtctatacttttgttgaatgttttgttctatcttctgaatccaccttaggtgctttagagacatcctcatcgcgttcttttgtcataaccctttcattatacttgatccaagatcctttccaatgtttccttggttgctgactagaagatatgaccacctcggtggacttatcttcaatacaatatcctctctaacattcctaatctttcatcctcgtggtcttggtataacccctcggtttaccccggcacactgcttcttaggacctgaccccaaactagcagccccatgagcaatccctcctatgacacgaacatagagcgacaacgcaacttgagtctgcccggggccgtgactccttgctcaagaccgtcccatatatccgaaggcccaaagccgacatacacggcgctgatagtgatgtggaggtactcagtgttctcgaggagtatgtcatatttcgttaactcttgtcctcaataaaggggagattatctattaaacatggagaattataaaagatcaaaacccgaaaaaaagtctagtctaataagacccaaaggccgcatagttataccttgttaagtttgaatccaccaacagcgcccctggcgaaaacaaagaaaaccgacccgacaatcatgacaacaccacagaatatctgtagcttggtataactgccatggagaacatccggcaccaaagcacctccaataggagtacctgtcaaggccgcaaacgagatgacagcaaagaaagtgccgttgcgcacgcccacttggcgaagatcggatatctgcgccacaagagccggtgcgagcgagacgaatgcaccagagccgaagccatatagagcgctgaacacaattgccggggcattgcctcttgacggtagccagagggccaggacgatgatggcggagaagaacgttgttatcaccatcatgttgtagcggccaactttgtcggcgtaatagcccgggagtgtgcggccgaggatactatttggattgtgttagttcatgaacgaggtgaagtgtatgaactagacagggagagaacttacctagcagcattcaaaatcggaatcagatacccggacagatcgccagacatgccatatcgctcggcctgggtaatcacaaaagtgaagggcaagaacatgccccagaagaagaaaaaggcaccagcaagcgtaagcgcgaacttgatctccgccaacggtctcaggaaaagcttgatatggaatggctttgggtgatgcggtaatctcgatttgagcgtgagattggcgatacccaacatgaacaaaatgaggaaggcgcagattctcatcgcccaggggaacccgactttgggaatcagttggctgaccatgatagggaagatgactccgcccagactcgatccagaggctgttacgccgagggcgaaaccacggcgcttagcgaaccaggtgctgacggagttgacggaggcgttgaagatggcgctcgcgccgattgggctgcagattccttgtgcgaggatgaattggtagtactctgttgagagggaagccatcatcaggccgaagacgtggaggaatgtaccgaggagaaggacccagcgcggaccgtagctgtcgaacatagttccgaagattgggccctaagaggatattaggatgggtcttcataaagctgactctgggggatgggatacgcacgcagaagaacatcatgaaggtctctagcgatgtgatccatgttactgtgctggtagagaactcgctcagttggtggctttgatagcatgtttggaagactccgatgcctggatgatatcagtatcccgttgggtccatgtattctgacagtacttacaattgatccagccgaagctgacgaatagtccacagaaagctcctaatacaaccagccatgcctgcgcacctccatctggtgggggaccgatcgccggtgcggagggtgctggaccagcagcgactgacttctcgacaggttgcgcttcttttttttccgatgggagtcctttctccgggtcattatttccatgcacactcacggcgggtgtggtggtggtactgtcgatagagggagccatcccagtctgcttgttggccatctttgttgacatagaggaagtttcgagtagactggaactgtaatctgctttgaggtattagatattgcattttgaaagaagacccccaatttatagaccccaaacgaagacgggaagtataaaattaagaaacaagattgtgcgttggacaagatcgattcgaaactcacctcaacgtcggcccaggcgtttggtctcaagcttcaggactcttgcagattacaatattccgagcttctggttccgtttcagtttcaaagatgctaagtcggccttcatttgggatatttaaaggagaaaagacctgcaaaaaaaaatgcaaagggacttcggtcaatcggtcaatcggtttctagctaagtccgagctgcttaattatgcttttcatactccgtactagtccagggaaagccctccagggaaaagcatcgttgcttcactgcgattggccaatatctcacagaacccggggtctggatcctcactggccctggaaggctgcagtggtcggacatgtctgcgatggcccgaagtccgaggcggatttagctagctcttcgggatattactcgtttgggcaatgaatgtcattcgagttcaaaacatatgaaacatatcattttggttagatgcagctgaaacagcataatctctgatattcattggctgttacagtcattttgaccaaaattgttcgaccttgtaccttttgtagggtctgtctgggaaaaggcgcacttttatatgtatgagtacgacgtcaaggtcaatgtaatagccagttagtagttatcactatggatcggattttggctattggatttggttgataggcatcgcatttgagagatacagcgccttccactctgaactatatagtttcgaaagtatgtacaaagtgagtccatactatagttactcaaagggagctgtgttgtacaacccccacccaacgtcacattataatattctacagctatcaatttctagtttcccaaattattgtcaccacgatggcccaagtcaacactctggctgtgagccttcaccaactggccaaaatgatcgaccactccctccttcacccaacagtgacagacggggacgtcatcgccggcctcagagttgccaaggaatacaatgtcgcgacagcttgtgtgaagccttaccatatccaactagccaagcaagagctccaagacacagacgtggagatatgtgctgtcatcggcttcccgcacggtaacagcaccacggaaatcaaggtgcaggaagccactgccgcagtcgaagccggtagtcatgagattgacatggtcgttaacatcggcaaagtcctcggtggtgactggggatatgtctcccaggaaatcgagcagatcaacaccgcagtcgtgcaaaagggcgctatcctcaaggtcattttcgaaaccgattacctcaagcctgagcatattgtacatctttgtaagatctgcaccgagtcaagtgttgcttttgtcaagacttctaccgggtacggcttcgtcaagcaggctgatggttcctacaactacaaaggggcgactgtgaagcatctcaggttaatgcgtcagtattccggccccgatgttcaaattaaagctgctgggggtgtgaggactcttgatgatttgcttcatgtcatgagtcttggcgtgactcgaattggggctactgccactgttgcgatcatcgaggatgcaaagaaacgggggatcggtatggatcggatcgaagttgaattcaagccaatgaaggaggatagtcaccgatagtgaaaggtgaatattgaaccttttacttagcggtttatttccggcagaaaatatattacagacaccgtactaaaagcaaagtacccaagttcacctgaatggctccaatccaatgtacagatacaacatgcttacagtacacaatagagcggtgtcgaaagcggtcaaaaatagaggtactaactcaggtactcaggatcaatatcactcgggggttgaaccctggtagctacctaggtataccgcttcgtatgaagaatattccagcttcctgtccctcttcaatagccttatgtggcatctttctcatacgattttctggagccatgtcttattgcattctttctactcgaaggtagcgaggattcgtatgttgtatatcagaagcaagaaaaagagatttgtcggcaattgccaagataaaagaaatgcccatactgtacaggatgtaacgtgataatcatcccaaatggagaccgctctagccctagcccgtacaaaacccaatgcgaagagaactcctccaagtcgaccctttcaagcgagtctttctatttagtttgtgcgagaaacttcgtcgaatttgaccttcccatctttgcgaatctctgcaacgcttcggcgcgtcccttcgatgtcattctctagttcctggacagagcgcgtcaggccagggacattgctgacggccttttcggcttctgtcctttcgtctactggcttttcctctatttccttcccgctttcggtggaccgaggagcggatgtactaggggacaaggtgaagccactagggacattggcaatctcattaacttcctgcgcggacaaaacgtcgttgaggcgaggaccacgggattggatgaggacggttgtgggaccatcaaactgcaggaagagctagacgacattgttagttggcaaagaatgaaggaccaaaatggggtgccatactctatctccccagatggtcattcgagaccaagtacgcagcttgtggaaccactgcatagcaattttgtatgccttggaatcagacacgtcacgaacgaacttggcattctgtagaagtcttggtagcgtcttcagacccggaacctggaagttgagagtggtggatttgaaacggtaggggcgaggaggattggaggccatggtgtaagcgaccacattgctgtcgatcagatattagcgacgtcagtgcaatcgcggcgagggtcatacctgggatgcgcaatgtattgctctccatccttcaattcgacagagtatagctgtccgtttccgaccaacgctattaaacctctgccggtcacctcggagctaccccaatgagacaagctctgcgcaaattagcttgatgtttccccacggaatcgtagttccactcactaggtttgcgttgatagtaggcttgatggtcagagaccggcccgtccatgcaagcaaagcccgtctttgggcaaccatccagtcaacggaaccattgacgttgacaacggcgaatgaggtattgggcgatcgaacggagacaagagctgtgacaggacttggcgaggagatctaggaaactgtcaatcgctgtcttcaaatccgcatctgcatcgcgcatcttaccttctgataaagaaatggcactccgacgatagccctccggaagggttctagaacgctcaatgtggaaatcacctgcgcggattatgcgttagtatcaccattccttcgtgacaacatcatgacgggatcgtgtacattatccgcctttccgctcaatccaaccagcgttcctcgtcgtgtgtataggttctgcgaggccgagagcgaaaccgaaagaagcgagtatggagcgccgacaacatcgaagcgcgcatctatgtgccctcatggtcagtgccataataatatgtcccggggcaattgcaattacctcgtgattcaacagagctgggcgtgctagcgagtggcagattatcgccactaaccgaaggcactcccgagggcgcggcgcgaatctgaacgcatcgcgtttgccggtgaacgcgaggaacgactcgagtccaggatagagggcgaacaccttggagggggcgcatggtgtttgaaaaaagagcaaagactaccgaagggagaatttacgtcagttgtgacgaaagggaaatcgggaaatcgtgggcccgagagccatgcggcctacgaagtacacaactgcccctctgaattgcgacatttggaagctttattataagaagtctttgaattaccctcattctccctttacatcttacttctgcttgactatttgcgaccatcccggagtcgaatcgagagcgacggtttttactccgaagccggcgatttccccccacgagctatccggagacatagctaccttgcgcgccaatctttcttacttattccgaagctcctctcggtggtctgaactactcaggagcttagagaatattattcctagcggccatgctgctcagagccgcacgatcgccgtgctggcgcacagcacaattcacctatccgagcttcgccggcaagccacgaagcacacgactcaatggaacacacctgcgcgcattcacatcaaataagagttcattatggagtcaatccacagacacagacaagaaagatcacgcatctgtcaaagctactcctacctctactcccgcctcatcacaactagcagacgccaatatcatccagaagccggaaggtagcggcaatgcgaagaccccaccgaagaaggacttgctgagcgagccaatggctggaaagaaagaacaaagaaaggctgactgggctattatgaaagaaatggccaagtatctgtggccaaaggtaagcctcgagtgcaattggtatggagtaacagggtattaactatagctggtaggatgattggggcacgaagctccgtgtcggcacagcactttcactgcttattggtgcaaaggcaagtttcgtctgttattgtgttttcgttaaaatatgcttatatgaatccaatagatcctcaatgtggaaatccccttctacttcaagaacattgtcgactccatgaatatagactttgctaccgtcggtggaactgcctataccgtggctgggtcaatgattattgcatgtaaggataacagcatatcgaagagagacttgtcgctaatatgtcttagacggtgtgacccgaatcggagctacattgtttcaagagctccgtaatgcggtctttgctagcgttgcgcaaaaggcaattcggaaggtggcgtcaaatgtttttgaacatctgttgcgactggatctcaacttccacctgtctcggcagaccggaggtctgactcgtgcaattgaccgcggtactaagggcatcagcttcctccttacctccatggttttccacgtagtaccaacagcacttgagatttcccttgtctgcggtatcttggtatgatttggaacctatatttacgtttctatcttactaacgcgttgtagacttatcaatatggcctccaatttgctgcgatcacaacaacaacaatgatagcttatacggtgttcaccatcactacaaccgcgtggcgaacaaaattccggagacaagccaatgcggctgataaccgcggagcaaccgttgctgtggactcgctcatcaactatgaggccgttaagtacttcaataacgagaaattcgaagtggcacgatacgacaaagccctgaagaagtatgaagatgcatcaatcaaggtgactacatctctggcattcctcaactctggtcaaaacatgatcttctcctctgcgctggccgcaatgatgtacctggcttgcaatggagttgcgaacggaaccatgaccgtcggtgacctagtcatggtcaaccagctggtcttccagctctcagtccccctcaacttcttggggtctgtctatcgtgagctgcgccagtccctgctggacatggagacgcttttcaacctgcagaaggtgaacgtcaccatcaaggaacggcccaacgccaagccgctgcagctgacgcagggcggccagatccgctttgagaacgtcacgtttggctaccacccagagcgaccgattctgaagaatgccaccttcactatccccgcaggacagaagtttgccattgtcggccctagcggctgcggcaagtctacgatcttacgtctgcttttccgtttctatgacgtccagtccggtcgtatcttgattgacggccaagatatccgcgatgtgaccgtcgacagccttcgcaaggcaattggagtggtaccgcaggacacacctctgttcaatgacactatcgcccataacatccgctatggacggattgatgcgtcggacgaagaagtgcgccgagctgcggaacgagcccacatccacaagcttattgagggtctgcctgatggctaccaaactgcggttggtgagcgtggtatgatgatctccggaggtgagaagcagcggctagcaatttctcggttgatcctgaaggacccgaaactcttcttcttcgatgaggcagtaagtgatcattccttggtcccacttgattgagataactaatcaccctctctatagacatccgccctagatacctacacggagcaggcgctcctccagaatatcaacagcattctcaaagagaagagccgcacaagcgtgtttgtggctcatcgcctacgcactatctccgacagtgaccagattttggtcttgaaggaaggtcatgtggcagagatgggctcacaccgcgagttgctcgagcatgacggcacctatgcagagctttggaatagtaagtcctcttttctttgctgttaatactccttactaactcaatttcagcccaggaacagacaatggctcatgatgggagcctggagcagagtcaggttgaggatgttcagcccaaggcgtgagatcccatccaacaagtgttaggctactattaagccgtactgaaaagcttgcagcacatagcatccgatgtaaacagcatcatgcatgtcttcggtgatagataacaataggattatgcacaaaagataacgtggactagttcctcatctatagatttcatgattcgctaccctcacggaacatacaccataggtgctgatccatccttgggctggtgcttgccttgagcaacacgcctattatgaacgacataaataacaatctgcgctgcagcactggcgattcctacagacaccataatgatcatggtacgtaggcccgtcgaataacttgagattgatatcagcaactgtccagtaattaccttcggagaataccttaacttacaatggtttgtctcctgcttggaaatactgtgtcccaaccattaacccgcttatcgcagacataacccacatcctgcagtcaactctcatcagctctagtcaagtcaaaataggaatataggaaaaacgcacgcgatgctgatactccgctcccttggatctcgacagttgatctgaacccaaaagttatgtatgggatgatatcccacagcgaaactgttcacagcagtccatagtccccaacgcgaccatttaccgacatggggctggaccttgaaatttactatcaacacaatcagatagcaggcttgagcagctatcacagttgcacctctgaggttggtccggtcacttatgtaggcgaagaagaatacaactccaagtgatagggacgcgccgactgcagctagcgcgtttgctgctgtcctgtcaaatccgagtgacctgtataaatgagcttcagatccatccatctacaacggcagtgaatactcacatgatgatggacggcgtgtaggtggttagaggactccatgtcgaaaacacgacgaatgtagagatgaagtgcggccagcgacggtagcaacacacagtacgaaagacaactttcaatggaatgcgcacgccatacgcgccctcggtacttccgccattgtcgtattcgagtcttttttgaagaatctccttctcggaatctgtgaatttgataatccccgggctcaacaatggccgggtgagatcgggtgatccaggtagaaatagtaataggaggaatgagacagatatagtgaacaacccctcgactgttgatatgttagcgaatgaagtcttgtatttagaagatgcatacttaggaagagccaccgccatcctcgaatgccgtgtcgaccatcaagaagcagaatgccagaggctaggatagggcttagagcgttgccgccaaacatcccaaagaagaaaatcgcaactctcttagctaattctcttttcgtataccacgacgacaaagtatagactgcaccgggaatatatcctgcctcagcgaaccctagaagcagccgtatagccaagaaagatcctcgattgtggacaaatacttgcatggtagcaagtaagccgaagagaaagacctgggccgaaatccacttgcgaggaccaatctgccaaagttactattagaagcaggccttccagggaactggtactgtacatactcgttgcaaggccatattacatggtatctcaaacaccacgatacccataaacatgagctgatttcccaaattaattgtggactgtgaaacgttgatatcagcggcgaagccaccagtcaatgcgctcgcaatattcatgcggtctagctggaaaacaagaagaccgagaaaaagcagaggcagcaccgacatatcgatccttagagaagttcatgtcagcgtctaatcctgatacttcatctatggggtgtcattggtggttactttctgcgagctttttgctcatggctgggttcccattctggtaagggcagcgataatgaagtagagtgctcagaggcgctatccttgagatctagcttctcatcgttcattttgacatccatattatatcatttccctccgttagacgtggatggtagaagagacctaacgacaggcaaggtagagataaccgaggatgaatattgcaagtattagctataaattatagacatccctgcaagatattacctcctctgccatatcataatttataatatggcgtgctacggtaaattccctaaatgaggcgtaccagaccttcaaactactataaaaccacaatttttctctctgggcgccgcgctttaatatcaacgggatttgaagggatttgaagacaaaccgcccaagtgaagccatgtggattttcttccttcgtaactggttggctcgacgccgtagccccgcgacgccaaattgcgtgacaaggcccagaatcgacgacagcagcgaaccctagatcggtgctaaaattccccagatcggcatttgcgacgggatctcgcctattgtatctatatatcgcaatctaacctcgggatgaatttatagctgtcttagtcctcaatctctatcatggtgcctgttaaacgcgttgcggtaatcggcgcggggccggcaggagctattgcgatagatgctctggcgcaggagaagacctttgacattatccgtgtatttgagcgtcgcgaaggtcctggaggctgttggtccgtttatcttctccggagcttattcgcgacgactgacaagaaaccccaggattggcgattcatcccagcctccaacgctccgcgacttcgcatctctggcgacgagaacagctgatcctccactacctatcccccaaagtttgcctgcgcagactctaaaatcggatcagcctcgctttactgagtcgtctgtttacccctacctggaaaccaatatcgactttctgcctatgcagttcgcccaggaacctttcccagaagagcgcagcgagctctccatatctcaccacggacccgaaaccccattccggaaatgggatgtggtccggaaatacgttcggagtcttgtcgagcgccggggttacagcgattgggtctcatacaacaccacggtcgaacgggtcgagaaggtggggacagagtggaaagtaacactccgaaaagatggagagaagagtgattactggtgggttgagtggtttgatgcggtagtcgtggcgagtggccacttctgggtcccctatatacccccaatagaaggcctggaggcatttgagaagaccagaccgggcagcgtacttcacagcaagcacttccgtgggagagataagtttgctggcaaggcaagctaacttcctcacaacaaaatttcaaggttttagggtcatcatgctaacgtaatgtcagcgagttgtggttgtcggcgcatctgtctcagcagccgatatcgcagttgatcttgttgaaacggcaaaggaaccagtccacgcaatcacaattggccatgctgccaacgggtactttggcgatgaggcatttaaccaccccaagatacaaaagcacccttcaatagaacgagtctcgaacaggactgtgcacttgacgaatggcaactgcatcacggatgttgaccacacaatcttcggcacaggctatagctggacgctgccattcctcccagcagttccagtccgcaataatcgggttccagatttgtaccaacacgttgtttggcaaaaagacccgacattattgtttgtcggcgccgtcgcggctggtctgacgttcaaggtctttgaatggcaagctgttctagccgcacggttgctggctggccgggctaccctaccgtctgttgaagtgatgcaaaaatgggaagcggatcgtgtaaaagctcggggtgatggcgtgaagtttacattgatcttcccggacttcgaagactactttgagacggtgagacatctagccggcgagggggaggagggcaagggacgaaagctgcccaaatttcgtcgcgaatgggtgcgggcattttttgaaggacatgaacgccgcaaggccatgtggaagcggttgaacctgaaatctcgagcagctttgatgaataccgagactacacacaaggaagtagctcggctttgagtttaactgtatgtagttatgcctgcatacacggaccataccctgaccttgacacggcagcatggtcatatgaatgtggctgcttacctttagactgtatgctatcagtttattagcctacttctggccaacgactataacatcaatgaaccaaatacttagaacacaccttcattacttatgtcagttcatagcctgtgttgttttttatagatctaatgacctatgaatatactccctacgagtactaattcattcgctaccaactatgcacgtagtctcatcaattattcggcttgcccgggtgtttggagaagaaagctcgtaaaagttctatcatgagaccttgtgcactatcaaagccctgcgtacctctcttagttatccactgcatcccgcgtaccggcattcacccgcgtgcacagggtataaaaggcctcttgtccccagaaatcttcttcttcttttcttttctcctcatcccccttcccccttctagttccgacttcaactaacgtttctgcagatattccttacactgcatcactgggcttacactacccccggctgatgcgaaccccctctgactgataggtagatctgacgttaccgcatatcttcctagtcttattttttgatctagcgacttggcctctgtgcttgcatatgcctcgttgcactgtatcactgggcttacaccacctccagttgatgcgacaggtagatctttctattacttgtaatctttggacccagcgacttggcctctatattgcatatgcctcgttgcactgtatcactgggcttacactacccccggttgatgcgacctttctcctttttttcatcaattattcggcttgcctgggtgcttggagaagaaagctcgtaaaattcccaccatgaagtcgcctctcttaccaagcgtacctgcgtgcacccgcgtatagggtaggtataaaaggcctcttgtccccagaaatcttcttcttcttttcttctctccccatcccccttcccccttccagttccgacttccactgacgtttctgcaggtcttcctaattctttgacctggcgacttggcctctgtgcttgcacatgcctcgttgcactgtatcactgggcttacactacccccggttgatgcgacaggtagatctttctattacttataatctttggacttagcgacttagcctctatattgcatatgcctcgttgcactgtgtcgctgggcttacactacccccggttgatgcgacccttccccttttttcatcaattattcagcttgcctgggtgcttggagaagaaagtttccttgattctatagtcctatcttatcctagcctttcagctttctcaatctcatgagtccacttgcattatttgaattcaatattcccaggtcgcctgcatatatttacgaaataggaaagagactggatgatttcaaagtttgacatatacctagagccttaagccaagtgttaaagtccatcattatctaaactacctaggcactgcttatggtatataatccattgacacggtgaggaattgtgtaaaacctctcctttctcagggctttgtccctttggcatcattgttaatcatcacttcttgttcttctcatatattgtacctctgcgcatcatataattgacggataagatatgttcgactgtgatagactacccaatagaccccatttatgcctagtgctccgggatcactctcatttttgttatgcgggcaagggaggtaagatttgattgtctatagacaaacagaaagtcgctaaatagctattttgcagccggccgaactaggcaaaccaggcaaggccggtgattgtctcaaattctttcatctcccaaaattctcttcatctagacacttctactctcccatctatcttaatcatctttcaccaagctttgttatcattggaacatagtgcaatatggaactcggacgttatatcttccagttaccctcggacgaggaactccaggtcttggagcagaagatcaactattctttttccaaccgaactctgctccgggaggcactccaacccgcgacctgggttaacgaagatggcaataagaaacttgcaatggtgggcaattcaattatgcgcctggtaattgtgaatcacggcctcaaaggaaagaagacgcgtggtatgtgtttctctcacactggctactatttcacaaacttacgatttcggctctggttaggtcaaatctccgatatgttcacccttaaggctagcaaatcctctctttgtgcgcagggcttctatctcggtatttccaaatttgtcgtcaaaagacctacccaattagtcgttggaccgactatcatggcgaccaccatggaggcaatcgtcggggcagtctaccttgactgcaatgagcagatccagccgtgtgccgttgtcatgaatgcattggatattgcttggtctgagtaaacaccaatcaccctacagtgacatacagtacccctgatatgggggctggcgagattgaccacagcctgtatgagtgtttgattcaacggtggggttgcttgcaatgacttgcatgctgcagcactatccaatgagtcttttccatacttttaatcgattccgattgatcctgaggggctctgtacattcccgtggcttggaattggctcctacaaaaacatactgagagatattgtggagaggacgagaaaggatatggttcggagctaagagaattgaatagctgttgcactgattctggtaactattatcttcgtctcgtcgtatgtcctcatggacatcagctgaatgcttgaagcacaggtagcgtcgtagcgatgtagagccgatactgtactcaaaactgcattttggacccttcttaagatattgactgactccagctttgctgtgctcaagattctacagactaactacgtcacgcgattgaaacttactaatcatcttgggcgccagatttagttgactaggcgatcccatgaaggcgatatggcggatatcccaagtaggcctattgccgccatgggtgacttatttacggagtactgttggctaatactgccttgccgctgattactctttcgctgatacggttggtctatcgtggaagtgttgttctccaatgagaaggatgtctagactcggcgatgatacgagtgccacagtgaccggggtatctgaccaaagcgtgccttaaattgacaccattgggggggccttgttgactaagataggggtgattgatacatccgatctccgttgataccaaaaaagcgagtgcgacgaattagaagccaatatttggatactccaccatatgatcaatagcatcgaaccttggagtaaacaacggtgtagcgagcgcacggagttctccttgttttttcttttccaacatttcgttttcagctatcctaacatcgcgccgtactgcgaatccaagttgtctaatttttcacggggtcttctcccactaccttcattatgacaccacaggtcaaaatttgggccgactttgcccatgtatccgaggaatctgactcagaaaccaatgaatttcaatacaaaatgttcgctgtcatcaactcggacgatgtcatctactacggcgaactacctacccgcaaagccgagacctcgtttcagcaagtcatggccaggccatgctcaagccaatccccgacagcgagatattatcagagtcgccactgtctggcgacaaacccttgactcaggcgccactggatctccccgccaatgttcaagtcttcatcaagcgacccaacatgtcccaatatgatgtgtattaacgacaaaatgtagtacacctgctcgcccaaagctttttggaggaggcccgtaccatggaagttcttgccgtacacctacatccttatttcgtccatactacggctgccgcttccggggaggctatataaccggaatcgtgctcggccgccattcgcacgacctgaagaattatctcagtggcggagtgagaaatatcgataagaaagcattcatgaatgtgcttgagtctgctatctatcacttacattcactcggtttggcacacaatgacctcaacccaacgaatgtgctagtcgacgactccgaggccagtggtggaatgccagtcctgattgactttggctcggccgggaaaatcggcagcttgttgggaacatcccgcggcacaagtggttggattgagggtcggattgaggactatggcatttcgaggaaggaacatgatacctttgccctagagaaaatgcgactccggttggacaacccgactttcgacgatgattaatggggaaaatagtgatatgtagagcctatccgccacatggcaaaaagcaagagactggcattgtcacaagtctgttgacaataccattactaccctgtagcaatatcagtcatggaactgccactagattgagataccctgtattacagtagagatccattacgtcttaccctttgggattattggatcgaaattacaatgtcgctagacagagttcatcgaacaatgaatatgcattgtttgtaattattaagagggaggtcgatcaaaaaccggggaaaaggcaggcaagaagaagcctctttcctcacctttgccctcaccctcatttctctttgtgattatttgcttaggtatactcgttttcttaccccgagccaattatcaaaaagagaaatgacggtgatggcaaaggtgaggaaagagcctcatttaccggaggggcgacaagctcttatttgattttcggagttgtcaaaggcttcttacatgctttttccccggtttttgattgacctccctcctaataatcacaaatagtgcatattcatcgaaaataaaagagaagttgaaatcaatacagattggaattggcaccagttgtatatgcttggtgaaggcggcgataaatggcggtcagggatatgcccgtacccgaggcccagcagagctccaaccaatgaagatgaagcaggagagtcaatggagatcctttgaggcttcagccttagagcccggtctttattttctttcgaaaacacaacatgaccagcccaattgcgtatatttctccaccttcagctgagccacgcatcttgcttgttcgatcctatgccatacgagcgtctaccacgctagctttacggagtacttcagctttagaaattcaagcccccagcgcgccatatcggagtacgtggaataagatacggtattatctgtcagcggtctagacccgaacttgaatactgatctagaaaagaaaagaaaagtcttcggctagagctacaacaactaagcacagggaatttacacaagactcgaatcttcgcatctcgcatacgtgcatcaaaataaattgcccaagactaggattgctgctttaccgaacatatccaggcagccccattagaaacggcacataatctcccgggactacatcgccagctccccagtccaagatagcgaccattaactgcgtgataggtcccaaccatatggcagcgctctgacgcggctttcgatctcaagatcacgtcatagtatggctggcgaactttccgctggacaacgtagagggtctttccgggtctcagtctcggacactgcaacggttccagcagagctagccaatcggaatggcccagttcatcgccaaacaagataccagccccctttcctcccctgatcggtttcaggaggtagtcgttttggaacgaatccgagactttgcaattctcgataaattggttgaatcccgtcgagcccgggagaattgtgtgcgccaagccttggttaaggccttcggcctgtttaggagtgatgatgttcctggagactaaattgttgagttcttcaagaacaagtcctagcatcctcttgtcgtgagcaagaaggatagttcgcatgtcgttgaagcatcgcaggctgatctgtcgtttcatctccggatcgagagcattgatctcccgctggtggagttcaaggccaatttggtgaatctcttccactatttcgccggactcgattgtgattgtctcaacagcatctgcttcagcgagacagcatagcttgtatccgtttcccccggagttggagggatctggaatgagtcggagagtatccggagttatgagtcgcagttttaatccatgtcttttctgagcaaattcgataaacatcccgatatcaatcccgtgctcttcgcctttgataaggtgcaaaggaatctcgttgtcgaacagttccaacaatccaccgaagacctttgagttaaccattagcaatctgtcttagcccagatatcaaatctccactcgcttaccgtttcagcttccacggcgttagtcagacctcgcgatccaagattgaatgccgaaagcgaatcttgcccaaagacagtatgcatgtacccattccagcagaacctcgcgttgatctcacagatgcgaaaaacctccccgccagcttcatctttctctaccaaaaagtctggtctccaagatccttgtcgttcgctccacggtgcgaacaggtgtcggtttgagtccatccactattgtaacaaccactcagtaagccaaaccgagccgtagaagggatgtagcttacgcgcagtaactcttcctcctcctgctccaacggcacacggagaggaaaccgggcttcatcatccgtccaccatcgctcgataatatcctcgatggccaatctcagagcgaggtgcaaatttctcatgttatcatcgtgccgttgggtagttaacacagggaaaggacacgatgcatccagagatccggctggccaagaagaggagcagtcgctcaacttcgagatataactgtggcggcttttgcccaagaggtctacatctagcccttctgctgtcactggtgagtagtcgacggcatcgtcatcgggaaagctgatcagatggagaggtttcattttgtatgtggatattttgtgttgataatggaaagacgggatgatatatgtccttcatgtttgaatcgaactattcaactagtggttatcccgagctgaggtggagaaagccagatctagtacggagtacttcgtagacgatccctattttctgatgttctctgtatgtatgtatgtaatgtgatgtattcgtgtacagtggggcctctcgggtatatgtgggtccaatggttcacccgagggatccgctataatgtggggccatacaggcagattttgactcgtattgacttgcaattacaggtttgagatcgtatgtacgactatacatataatacagcattgaaacattcatgagcttccaaatggtgcggcatcccatcggacacgccgaagatgtcggttggggtctttgacttcattgcgcgaatgcagccatcggcgattatccatcaggataattgatccttggagaagacactggggtgtgaggtggagagtctcatcccgggcgccaccaccgtacagaatttccttcagttcatccagtgccttggtagcattcggagtcaagggaaccgtgatatcttcccgaaaccgcaattgactgccagacttcccgtcaggattcacggcgagcaaattagccacgatatgctgcttcccctcggttttgataaactcaggagggactgtaattttgtagttgtggctggagagccatttttgcgcgaaaggcgaaagcaaggtaaggagtcgatcgacgttcagcacagacaacgtcccgccgccgcggcggtctggctgaaggacttggagggcgaagaatctgggtggttgctcttcatagctgcagtcggtgtgccattcaaatcggaacattgtctctgatcgggcttggtggccatggctttggaaactcgctggggagggccgaacatcccagaaccaaccgcgctcggcgctgtgtgttattgggaggccgtggttgtggtttttgtggagattcgatatcagactctgcagatatgtgctgttctcgtcgctaaaccctagatgtacttggagcacacctttcgcttcgagggtatcgtatacggctctcaagtgggaggcgtcggaggcgagtgctggcttgggaatttcgattagggggacgagattggaggttcgtaaatctcctgttatagtgagtatgagaagaagaaaataacagacgatacatactgatagggcgggtagaataacttgccgtcagtctggctgtagaaacagcacggaagagttgatgcattttgtgcaaccaccatgtaagatatggaagagcagtcggcgctcaattacatatataccaacagctccaaatgcaacgaagaagaacaatatcacgaatatatgcagcataccctgtgcggaggacagagtagaggagcaatatatttcgactggtcatatagggaatgagacacatatgtagtgtaatgctgtatgattggcatgcagattactgcgtacagcgtatggtacaaattatcagattaattgcaactcctatagatgcggctgagctgacccactcgggaaacacggagagcgcaatgaatgtgtcgtacgtacaaagagagacgaataagaatagaaataagaaaataaaaatagaacacctgaaatgggatctcatcccatgtaacttaacttgtcagggcttagttcaggacatcgacatttaaactagacgagcctatacggcgttggacacttctctccaacttccaacaacctcgccaacatgactgtcattaccgaaaagaccttaccaataggctacaattggcgttcctccaagtggttcattctctctaccatcgcaatcgcgttgtttgctggtctgtctgcccctagaataattgaaacaacacaacactaatatcgagtagaaacattcctttatggcttcctagttcccatcctcggagaaatgcttcgggaccgcctccatgtcccgccatctcaagctcaggagttaacctctgccgctcttgccctacatggtactctcgccatggtctccggccctataatcggtcatttcgccgacaagaatacaggccgcaagaccgcactactattatctctcggatggtgcattgtcggcacgtgcatggttgccggcgctcattcagtccctatactactgctcggccgcgtgttgcaaggcatcgcagggtctgctgtgtggattgtcggcttcgcaacagtcgcagacactgtcagtccgagccgcataggtttcgcaatgagcttaatgatgtcctgcgcaaacaccggagtaatcagcgggcccgcgattgccgggctgctgatagaggccaccgggtactggataacatggtcgatcccgctcgtggtcctgacgatcgattttatcgcacgcgtgtgtatgatcgagagtccgtctagtcctccctctatgccaaccgagactgcgagtctgctttcctcttgcgaagagcagcaaattccatcccgaaacgatagtttctggcggacaatgctatgcaacggccgtgttgggacctgtctgctgattataatctcgggtacaaccgtgagcacgagtttccacgcgacgcttcccctccacgttgaagagacattcggatggggtcctcgtgccgtcggattcctttttgccggccttgttattccgggtgtcgtgatcggtcccattgctggctgggtccgtgataaagtcggaacacgacgacctaccatggtctgtgccgttcttgaggcaatagtacttggcctaatgggtattgctggcgatattccttgggcgggtgctcgaaatatgggtaaaccgctttacgtcgcctgtatcgttgctataggcattttgcggccgtttgtgtctggcatcgcgccggtcgaactgacgggtaagtcgtctctctccggctatgaataagtgctaaaaatatctagccactgccaaagctatccaggaacagtccccagggacatttggacctaaaggaggcatgtcgcgcgtattctctatgatggatgttgctgattccctcgggatgatgattggtccaatcataggcggttcgctgaaggaaatggtcggctataaatgcatgagctggacttggagtaagtggtttgatcttagtataatcgggtaacttactaatgatagcaggtctcttatatctcctcctcgctgctcttgccatggtcttcttaggatcagaagatgctgaggaagaatagttcgggcgactgtgtactttgttcctgtttttcttttccatcggaatacggtgacctaattgggccatcggacccacatatacccgcgttccaagatttggcccgacagctcgggaatgaaaataccgcccacagatataatacggtattctcattggtaatttcaattaatacatgaaaacactgcaccgggtatggaaatagagtaaatacacgtaaactttttattactccctcgcgatcgtccggtggagacccgagatctgcaggcactactcagctgatcggccttcatgaggtcgtctccatgaactagtagctactccatcgtactccgtagctcagctactccatacaaagttcagctactccacgtcacaaattcaagttcattttggtttttctctgccttgtcttgatccatcaatatcaaattcaaatattcggagtcttctcaatcacaattaagcctatcgccccgactcaccctcccgcaatttcctaccttcaattgagattgctcgtagcagattctcgcaatggcaacggaaaggtattcattagcagaggtgctagccgtcgctaagacgcaccctttctacaacccggacactgtataccctgccgatgcagaaacaatccggaatcttcggaagacggtcactgaccaagaggcgaaggctaaattccaagagcagccacttcttgaaaagaaaacactgtaagacaatatcggacatccttctacagtagttagctaggctaatttagctcaggtacaaggccattgaacgactctcacatgatgtggacccgcgcaacacctaccgacaaagttcctacgtgagcattactggcggtggttctggcggggtgccgatgatgttcgccgtggatgtgcacgagaaccgtcgacagagagcgcaatttggggaatttctcaaattgtgcggtgtcattcagcctggagattgggtcctatccactcatgtagcgggagggttttacaggtactaagatccgaattgcacgagacggcgcgatatcctaactaagaacaaggtccctcgatctcacgacggaaatcacagaaaacgccggagccaccgttctcagcgccggaagctacatgtcacctacggatgttgctaaatccctagccgactatcacgtcaacatcctaaccggtgatggaagccaggtcgtccaagtcgtctaccacatctccctcatggcgccggaggatcgcaatcgcatcgccctcgacaaaatcatctacacctccgagcccttaaccggtccgcagcgagcgttcatcaaggcggttctgggcgacgtcaagataatttccctcatgggaagtgccgaggcaggcccctgggcaatcagcagccccgatctgaccggggagcagagcctgactaataatagcacggacttcgtcttcgacacgcgcaacatcctgatcgagatcgtctctccctctgccgtcgacggcgtatcttcgcctgatccaatcctgcttccagaaggagaacaaggtctcatcgtgcagacatctctccaacgactgcgaaacccgctggtacgctacatcactggtgatatcggcaccctacaccccctcccgagcgcagcctgtgctgtaatccccgaggcggatcgggactatatacgtgtgttgcgcatgcgcggccgcgataatcgcttcagcttcaattggttttcctcttatttcgaatttgagaagatcgatgccctcatgcgggcggacgactgtggcattctgcagtggcagctcattatggatcgattggagagtacgccgcaggcgacgctagagatccggctgctgaggtcgccgcctcgagacggtattttatcggatgatgctcttatcaaccgcttcaaggctttctttgttataggttcggataatgaggaactcttccgaatcgtgtttctggataatcttggaggattcgagcggagtgctactgcggcgaagattattaaatttgtgaatcgatgggattgaaccaaaagtattgtctcttctgttgaatgtagagatcaaatattgtttcttcatcctgcggactccgagctttaaatccggtaatccggcttatcggatcgcatccggacttcgatttaacttcttgttaaatccgtttatagttggccaacagtccaatcagaatcactgcttttccagtgtcacattctcgctttctctattgagatggccaggtcgacagtctacggtctaccttaactccggcatcgccatccctcaaatccatgatactcactttgtttaaatagataccccgacccttgattctatcaaatatcaaatccatcatttatttccaagatatcccatctacacattctccagagccatgtctctctctggaaaagtcgtcctcatcactggctcctccaaaggaatcggaaaggcaacagtcctccgccttgccagcgaaggagccagcgtaataatcaactacctctccgatgaagccgcagccaacaaccttgtcgcacagatcgggcccgaccgcgccttagctgtccaagcagatgcatccaatctgtccgatctcgatcgcctcgtggattccgcagtcgccaagttcgggaagattgacatcctcattccaaatgcaggaatcctcccaatgaaggacttggagaatacaaccgaagcggatttcgacaacgcatacaatctcatggtgaagggcccatacttcctagcccaggtaagtactagattacattcttgtcctaaatcatagcatttaatgatactaaccgtgttctagaaagccacaaagcacatgccctccggtggcagggtcattttcatctctacagggatcactgctctttccagcgtcgcacccgcctatcttctctatgcgtccgctaagggtgccatcaatcaaatggctcgtgtcatggccaaagacctggcacggaagaatattatcgtgaatgccgtcgcaccggggcctaccactaccgagctcttcttgaaggggaagtcagaacaggtcctcaatgcagtcgctgggtttagtccgtttggtcggattgggaaaccggaggagattgctaatgtcattgcctttttgtgtggagaggatagtagctggatgtcaggtcagattgtgcaggtcaatggcggaatggcgtagtccgaccgcggatatttgctgtcaacacgcactttacgttcgtcaatgcggccataggaactcgagcctgaggctggtaccagaacttgactctagatggaggctacttttgtcctatgttcgagagacttatatgtgcaatgagagaatcaatgaccgtgtcatttctgaaaaacacgtccatggcgtctaaagcctgtatgaaggagactgctaagtttagcgtcgatcactgacaaccataattcagtaccatttccccctcgtcaagaagtttttgcggttccggaagtaatggaagaggaaagatgcaaccagctgtttcatcgtgcgaacgactattttccgggtcagagattttgacaaagataaacaattctggtcggttctgacttacaaggagtacctttcattgttatacaatgccttgtagatcctctgctgttgttctttatcacgaccatagtcgaaaccgactgctttcagaagcatctcgctaaaacagtattcttgacagaatagactggcaaattccaacagtctcggataaaatcccgctgatgcccagtccaataaacagacacggccatcatctaaccagatgatgtttcggggggctatgtctaactgacagagcaccagtggggtaggatcaaaatgaaccttaccatccccgggaaaaagccggctattgaaccattcctccacttgctgaacattgctaatggtcagattatttgtatctggccagagtaagccaattgaagggccaccacacaggctaccagccctatcggcggtaatagagtgaaaatactcaagaatgtaggcgagtctctgaatgtgagagtctgaaagattatcgataatcttgccctgaataaaatccgatattatatagccccaaccctcatcgtccataaaaaaattatgaaccgaaggaactataatgatatctagattaattatgctgtatgctttttgctgattctttgcctcatgggaggagacaaaggggccaaacttgactaccaagtcacaatctggtagcttaacgacctggttaccagacctcaatcctccagtaagctgatcttctggacaagaccggcaatagtcaatgatcgactggttattgtctagttgaacagtcatggcagcatcagacattagaaggggggtagacggagtaagaatgggaaagaaaacaatggtacacatgatctaccgcctcggataatagatagtcccttagctagccatacctgaccaacttgaattcaaggaaatatggtaaatttgaatcaaaatcaaattctagcagatgcctggcctattagtcacataagagtcgtggttcataactagttaccggtgctgcaacagatggggggaggtggtatcattttcactccatttttacctgcctgcctgcctgccaccacaatgcctgctaatataataatgaacccagtcagcatggaataagggtagtcccttacaccgtgcggcgtggcggcggtaggggcagggccagggggattcatattgaaaacgccattagagatggcatcgaatatgcattcaaagatgagttggttaagttcatagacatattggcgggtatagtggtgggaagcagacaggcaggtaaaaacggagcgaaagatggacattggagtcacgaactgtctgaagttactttggacattgaattcttatttatagacgacacgaatcatgtgatttactagtaattagtaatatagggacccggccgggaggctttacatgaagtttaacctagcactacctgctgtcttttgtgaaacgttgtatttttatattttttgaaaggccgaaaggcctatggtgatgcgaccaaatctcttccttgactcttgctctagccatatctctcgagaggaaaccctctgctttatcatagaccgtctgatagctcgcgcttggggacgcattaattaggctaaagcccaagtccatccgccaagcccgcaactatctcatacaaagcccaagccccggggtctgggagttgctgacttgaggcatccccgacatacgttgctcggccgaacttggccttgagatgtcttgtttcctccgcctttttagcagccacatccactgctgacagaaaatcatttgttttcgaaaactcctcgctgaaagggagtaaaacgtccataacagtacggtctccttcccttgctcccgtgtgcgacttcagggttgtcgtcgcggacgccagagcagttgaatagaagtttggcgtattagggcagattccgtcgagcgaattctttctcagggctgtataaagagcggaaagaagaactccaaatattgcaccgagggttccacccatgtcgtcgacattctgcaacacagaccgaattacctctagcagatcgcctgaggctgtgcagcctttatcgacactttgcaggactgattcggccaagccttggactgcctcgccacagtctccatcgcccatgaccatgtcccactgggtcagccttggctctgctgcaatggctctttcgcacgaggtccttaaggctttctccaatagtaaagggtcaaatttgatgcgaggggaagcggtaatttggctgtttacctcggcatcgagatcatcgaaggtggtcttctgttgagaaggagagggacgggaggtgtttggccaagagacagcagtggtgggacaatcaaagtgccgtatcaaggtcgcgacagattgattcgattgccgagctgcggcggtaaggttgcagagagaaatcgaaaagcctggcgcgttgagagacgtttcaaatgaaccaaataatgttttgcaaggcctgatgttccatcgtgagcttaactgacattggatctcatcggtcagagcagataactcgaggacagagaggccaccatagttgttgaccagtaaaccaatttcatcgcgtggctcaaacttgacaaatgctcgctctgtatcggaatcatcgcaaaggaatttgagacactgctcaataagttgctcgacagggggggcgggggaaagatgaagttggccgggctcattatgtataccggcgccgacgacaaccacattgtctgggacggatgattgttggtgtctgcctggaacatggcaatggtcaagagccgaggcgatcgtaaccgtctgcccatttattgcttgtcccagtgcaagacactgtttgaaagagtaaccctccgaggcagctgccccgatgatcttcattgctacggcgtatccatcagcagccatcaaaccagggaacaagtaacaatcttactaaaaatatgaccaggtagccctctcctacccatgtggctatttttacttcttccaatggagacatcatctgtagcatgtagaatggcaatattttcaaccagaccttcagccttcgctctctcagccgcaaggccgaagtgaagacgatctccagtgtaatttgttatgagtagtatagtccctttcttcgatggcgccgttcgaatcgcagccaggatttgctttgcgcttggtgacgcaaagatatcaccgcacgcaacagctgatagcaggccatcaccaacatagccactccacgccggttcgtgtcctgagccgcctccgctgataatgctcacctttgagtcatcatgaaacgcattggaaactactctctctgtgtagttcaaactcaagtgatcgtttgcggagacaagagctcgcagcgctcttgggaccaaagaattggcgcttgttgaggggaagtagtgtttgtcggacatggtttgatgggtaaattattggtagggaaaggataaagcaatttacctctaaatacgtggttcgtaccatcttttaaagtgtccatcccgacttagtctctccatgtgactggcttcgccaagggttctccgagcttggtaattccgtgagtccaaatttgaagagagatcccggagtggagatagcggtgttcatattccgcacatgttccaccgtcgagtcgggaggcctaagttggtactgccgttggagtacatcacgagacgtcaaagtcctagcctaaaaaggaaatcccgcagaatattccgaaaatggctgatgaaactgaattcggcttttctcttcaccttcaaaatcattttcgaaaataagagattccttgatcatggaagttgatttagatttctcttacaagagttgtaacttgttgaaaaagtcatgttgtattaagtatcttttgtattgagttgatatacaaaagatacctaatggaactgtgctcgggatgtggggccgttcgatctagtagatccggtttgacgaaaagtccccgcctcgcggcccacaaagtttatcaatcaggtacggaggagatcgaggtctgtacctgcttcatcaaacaagtaggtgatcaccacaaatcctgggtttagctagaagcctagagctggtgcagtagaggcaaatgctgaaggatttcatttccttagattggatgaatggcaagtaaatgttacgtgataactaacttgatagactatgaaaagggtttattatgaatagaattactcctagactaatttacagtggtacagagtgtctaaccaggtaggtcgttcaagagatcaagacgcgttcaagttggcttgcacgagccaagcaagtcctagtaccaggattgaggtgactgggatagcaaggactcgcctagcagtgaaccaactctcattgatcttgctattcgcaagtctgatgctctgcggctttagggattcagcaaatctctcaatctatacacagttagcatatggctacagacctctgtcgaataggtattactaacctgttcgcatgcagtcttgatctccaagtaattgagatccttggggtcattcttctgttgaattcggtggacaaaatgacaaaagaccttgcacaccccctgaagacctgcaccagattcgacgacaagtccaatcgcctccctcttggtgattttgatatttcgttcgaagagagccgggttgcggaaacataactccagtgtagccatcgccatagattggggaatagcacaaaatctgaacacgctctgctcgcgcaagccagcaagatacgacaaacaatcagtcgtatgtctcagagcatccaacaccatctcagagctgcagttaagggccagctcgtgattgtcgggtttgaacaggtcttcgaaattctcgacgtgtttggaccaaatctctttcggccaaaattgtcgaccgtcatcattatcttcacggatatcgcgaatgatattgttcttttgcagtaagaggcccatggacttttgcaggtgagactgattgatcacatttgcatccgccagatcagcttcgacaaataggcgggttaggccctcgccgaccaagccagctacataccaacaatagaggtcgtactcttcaatcgtattgacggctatatctccaacagccgccttttccacgaaatcggccatgccattccccattttatcagtggtatccttgatgatcgcttgatagacaggtttcatttgtcggaattcagcaaccacgttatcgaactgcactaatagctcgcgatccttttcttcggggcggttgccggtgaaggtccagccatcctggtccaggacatctttgaagtttcgaaggagcggcacttttgtctcgagggggattgaagtatcgtcttcgatggtatccagaccacgtagtatcaagtagaacacacaaacgggcaaacgtagctcgggatgcagttccttgacaacgggactgtagctgcgaccggtttgatccaggaagtcgaaacagattttggttgaagactcctgctgtttatttctctcatggataggatggcgccgcagtttcctattaacggtcagtacccttcgaatgcagtgtttgtaaagatgttagagatggctatagacttaccattggattatcgtgcggagctggttcgggcgaagcacaaagtaaagaagatccgatatgagatccatagtagggagtgacagggtcttgttcggaaaactttttacagaaaatctagttaggggtcgattgttagttattgactcccaccaaaaacggcccggaaacggcccgctatcgccttcatcctttttgaagagaattatatgcaagaaacagacgtatctgtatctctccagtctccgaattgcaaatatcgatatcccctctgatcgccggtacttttgttccacgccatggcgtgtcttccggtaggcgtgcgttgacagttagtgggactggagcggcaaggccatcgtatgaattcggaaacaataccaaccagctgatcttcgtagtggtgaaaggtgttcgcagggaacaatctcgcggggcggcaaaagccagcaagagcgactggattcctgcctccagaatgattggatgaggtagagttgaagaacatagtccctcggcggctgtggtcgcgatggcagcgcaggaaatgtccaggtgctgctcagcagaaatcaaagctctaaaaagtccattatagctcagatatgactctgcgagtgaatcataaaattggtcaatattaacaggcctcagcctgcccggcctggtatttttgaacgaaggtaagatcaatcggtcgagtgaatctggcctgcaaagttcacgcgtaacaatattttggcgatagtgggtatgttgtgattcgcagctccgctgacttcaatattgaattctgtttcaacgccgtcgatgccttcaacatttggattgacaaggtcggcaacggacaatgagatatcaaactctaaggcgggtccttccagtattaccgattgctctagagtaacgtctgcgagctcgatgctgtttactttcttttcattacgcatatccatcgcaaccgcaagggccgagacgcaaatgatagatgcagggacaacggattgaccttgtatgcggtaatttttaagccatagaaaatcttctaatttgaagacgtgccgccacctcggcttcattccaatggtacttggaacgcggcctccatgtagcccttgaggtagtcctgtcataatcaagttctccaacggcagtggaaaggatttgaatcgcctccgaagtgaacgatgaatgagaagtcaatcctcgctaattgagcaatatattggtacttaatcctggatcaccgtctctccagtaaccagcggcttttcatatgtctctgaagccgattcgatatgaacagttcataagtacgatgggcatcgggtccgacacatcgccccggtccacgtccgaagagacccagagctgacatcgtaaattagagtctaacaccgaaatagaaactttgccgaaactcggatctggccgaaggactccacagccgaaatctataaagactcgtaatgtactagtatttcagccctggaggctacgaccgagaagatgtgctgtttgagaaagaagaaaaaagacccggtgacaagaagtaagaatgaatgttctgattgccaggttatgaaacctttgatatatctttcgtacaagagtggcccttgagtccaccaaaaaagaaagaaaagaaaaatgacgaatacgtttagaagtcttctccgcgagaaatcacttctttaacgttaggccgaagtagaattgtctgagttccgtcagtgagatgttcctctccagaaaagaagaaggggggtgacttgcgtgttcgaactgggccgaataggtcccctgtttctcattcagaggggggtaatcttcgacaattcccgatttcactagattattcaactgtcttttatgtcagtcaatagttccaatccaatccaatgttttgaaggcaattccatacaccaaggagatacttctcttgtccaattctgtccaaatagcgccggcagaaagggatagtgctgaaatttttcttgatagcacccaatacatttcttgccgaggacagagttagatccttcctttttgcgtcaccgcgtagagcataatgagagacttcacccccttcgacgcatcggccggcaccggtactaccaaatgtttcgatagcaaaaacatcgccttcttccatctttgtcatatcattggatttgacaaaagggacactcttagtcccatggattgagtaaggaaggattgtatggccgcacaagttacgaacggcctttatcggatgagtcttgccattgatttcacactcgtagctttccatagcctcttgtattaagccacccaattctccgactcgaacatcgataccggcttcccggacaccagtattagttgcatccttgacagctgctagtagattatcatagataggatcgaatgccattgtaaaggcactatccacaatccgaccgccaacgtggataccgatatcgaccttaagcacattgctttccttaagcactgtcttacagccagcgtttgggctataatgggcgacaatattgtcaatgttcagaccggtaggaaatcccataccagctattaaagagtcgccttcggtaaggccatcatgccctactaaacgtcgcgcactatcctcaatgccgttggcgatctctaggagtgtttgaccaggcttaatgcttctttgtgcccactgacggacctgacgatgtgcctcagctgcctggcgataatcggaaaggaaatcggaattcagattgtccaggtatcgcttctcctcgctggtagttcggtatcgattgtcgtccttgtactcgacctcttctcccttggggtaggtgttgttcgggaacagctgggagatgggaatcgatggaggatcggtctgagtctttggctgttttttgggcttcttctttttgttcttcttcttcttggcagcgctagcatcaacggctactgccggttgatcttcaccgtcatctgagttctctccttcccccgatatccggtttgctgcggcgcggttggaaacaggcatgtcggctgcattcgcagcagcgccttagcaatgaaaatagatgtcagcatatgttcccgctgactcccatgtgtcgactgaaatatattcttaccctgcccgctgtttaccagcttctccgaaagttctggcgggtcggttgtcatgtttagcactgggaggggggaagttggaactccaaggatgggaaaaatgctctccaaatttatctgccccagaacaaagacaagagcgcctacaatctgtcgggtgaaatcaaagttacggtttttaatactgtctcatacactagccaggtgactgaaagaaaaaaattcattcactcaactccaccgtggattatctcaggaatcccactcttccgtacagtacagtcacgcctgtatttattgattaatatgaaatacagtgctcggttgttaaaagacaagaaaaatactcgtttaaaaagatcagcgagatctagcaggagggtatatttagaatgaactttagttgtagatcgatgaactagacttattctgactattttatcagctactcccagacttgagttatttgtgttgaagtgtttcataatgccaagtccatagcaacaacatagccgtcttaccatcccaccctgggagccagggtgggtctgtcccataggatagtatctggtagcgaatttgtcactaagctagaaggctcggggggatagtatattgataatcctaagagcttccccctgggctacttagtcccgtaatagaccgagaatcttctcaggatcaaagggataaataccacgagacctaaaagatgatctaatagtccgttaggtaaagccctgctatcggattttatcaacttgccattgattccaagacgaaagccatcaagaatgctgattcctatgcatggtttgctaccgctatgtatctcgatcaatgtgactggtctcgaatgatctgcgctcagagcaccagcacttcaactgtcactaggcgatcgaacaacgaaacaaccactgatatgcctgttatgcgaaagacaaattggcgtacgctattcccccgtgtattggcaggattgcaaggtgatcggaagtaagcatgatttggtacctaggtatggtgatcactcgcaaagatgattcgaggcgctataagtcgatgttgaagctggagttcgttcacaaacttctcaggcgtacctgatgcagtgttataaaatgcgcgctggcttgatggatatgaagctttgttgatctgctcttaatatatctaccttcctacgagacgtttcctgggcttatttgatgtgcccgagtaatcttaaatcaagttaaaatgaggtcattcaagaggccatcggtcattttcagcacatttgaaggaaaactgtgaagcctgctctatcatttccttcctactacaggtcatcgcaatcaccttcgaggtctgctatattatgtggcgggcattccatcggttgagttggtagaggctctgacacgtagttttccggtacatagtgaacaatctccacaaattcaacatgccgcggttcatatccgatcatcccaagatcttccagccggccaaagaaatatgacatgatatccagaggtgttcttccgcctggatcatacctcactttttctttatagattcgttctccttccttgttgacaaatttgatgaagtaaacaaaccgcctggcagtttgtccctggtactcacaagtgccctctttccacatcacaggagtttgagccttgagcgccgccgagggatactcaacggggtcttcaccatcgatgtgccagcggggtaacacgctaaacttttcaagacaggaaatagtcgctggatccaagtctacagggaagtagattgtcaggacctcataaagcataggaggagacatcgggtgggctgctatgatgtgccccctatccgggagcaggcaggaaacttctcggctccatgagcgagttgcaagagcttcctctaatcggagataaagttccgtcgtacaaaactcttccttgtctctgctgcctctccactctagtatttgattaatttttggacatttaaaagacgatatagcaagcatctttcaaaccaatagtgtaatactgcgtaccgataatcaaccactcaatattcctcagctcctgcggacggcctcgggcgacaccggtgcactcttggagtttttgtatctcttggaggacggcaaaaatttcatcgctattggaaatgacaccattgggtgcatctttgagcgatatccattctagaattcgacggttatcgggcattttggctggaaatggatctttggagttttttcttcattttcttgggattatttctcccggtgcgtccgtttgatcgagtggtgacaggcataggaccttggaatgaaagatgtaaatgtcaaagtgcaaggtcggactcttcttgtacgtagtggatctggtcgatagtattgctgaaacataaaatgtacatatattgcgggtaatatgttaacagtgttgaaagtacggttgctctcacgttgccgtacctatttgatgaccgcaaattagaaggatctattgttatgaattcaatacgtaaagataggacgtggacctcgggatgttccggtccattaccccccactccgttatacgcctttgtaatttaaacgggagacgtttgctctccgacagtccgatttaataaggctctagacttaactggtacataacgaaatatcagccttggagccaagtatgctggtatccacaggccaaggccactaggcatgcacgcttggacaaatctgtatattgtacaagataatttgctaatgacctcggcagcacgtatgtacccgtagcggattctcttgatagcccccaaatgctgcgccttcggccgacaagaaaacaggactgtgatgggcgagatttatctccgacagaggagtgtttcgcctcgtgtatccgacaccccacgcaggatgtattcactagtaatccatgaagttggaaacgaacgccacaatgctacggaggtccccaccagcacaccaagtccaatgacatatcatttcctgtctcttgatgtagaataggcgggtaaaaagtacgaagggtttgaagaggggtctatttgacctatggccgagtaagcttcaaagttataaaaatgtagcagctatatccatcaccgaaaagcgttagcttcctaagtttcggttttaaatcgcttgtacctctcttcctttgttcgatcaggctcgtcccattagtaggagtccgtactgtattgggcagaaccggaatcacgccggagtcacatcattcgccgaacgtgaaatgaacatgcttgtgcacgatctagtgcttgcccatctagcctgcgatcgctaccatggccagaagttacattgcaggagagagagtaacagcagcacttgcctgcgatgtgctcgggctggtgttcgatgtaccccacaacaaatgaggttttccaacccactggagacaattcgatatgctccggatctgtacaaatctcctctgggttctcacagcttcacaataaacacggcatgctccagcggccttgtgggagtcgatgtagcctgtaaaagtctacgggcagggacattggctggcgccatgggtggcaggtgtcaatttatggctttccccagaacatactaaagaaaggggcaatacgcgcgcggcatactcaataagcggcaaatctcacaccttcgatgcaaaggcagatggttactgccgggccgaggcagtcaacgctgtgtacctcaagcatctatcagatgcagtgagggaaggtgatcccattcgtgtattgttcgcggcacagcaagtaacagtgacggatgaactcctgggatcaacagtcccagctctgaggctatgtagtctctcgccattttcatgcgggttttccttcgactgtctaaaaggccttctcgaatccgaaaagccaggtgctggcgttgcccatggcagttaagagttgagagtaccatactcaaagatcactagatgtataccaaagcgtcaagtcacagacaaatgaaagaggttaagaaatatgatgtcattgaaaaccatcgaacctacgcgataactattcacagacgaacgatcccgggtatgatcacaaaacgaatccagctaagtacaagacacgaaaacaaagtctatgcaggagacaacctggaagttccagctcacacatgtaactatttcttggacgacttccgtgatccaatacccagccgccccaggttcggaagactagacttgtgtttgtgagcagatggtccagccttcgtactgctctccaatacacgtccgacagtggtgccaccggcgccatgaccagaacccagcgctgaatttccaatagtgacgttactggcacccgaagcattgcgcggagtatcggacagactggcacggtgtctgggacggtctgcggcagccacggagagagcggctgtaagagaggggttgctcatagggccggactggtcgaaggagtgacgggtggggcccagggctgctcgacgggctcgttcctggacggacttgaatttgtcgaggagttcgacccagcggatggagttctcgtcgcgggttttcaggcgggtgcctgtagcacggtcgaatgacggggccgtttgtgtggtgctaggaaagttcgtctcagtaaactttgaggtagaatgcgaagaacagcagccatacctgcggattccgccgtggaggaaaccaatattgctaacgctgttcagacgattcttgagggcggcgaaggcggagctctgcgggaggagcatgaggacgccgtagagacatttgtacaggaaggggtatttttcgggttcaaggagttggaggcggagatctgttggggttagtctctggactaatgttgggttgatggaaagaaacggacatgtgaatacaggtgactcgagtagttgcaccagtttgtcgatttggattagcatattaactgtcatttccaattcggcactgtgatggttccgtcagcggatatcgtggtggatggagctggtatactgacaagacttggaggagattgtatgcctgctcataggcctgggcaagaagacagagagaaaacgtagagacagcattgtggcaccaggatctgaaaagcccaacaaagaacatttgaccatcctaaatatttcattaatctcaagacgtaggacagggtgtctgggtgtattactctggaatcgagatttcttaagcgctttcttaaatccgcgagttcgggcgctgtgatgaggttgttgttcaagttctgaaccatgatactagcaaattcaagatcctgatgatacattagcatataggaccccaaaatgtgcaagaaacatcacctcttctttctcgaggcattctgccaaagtccgatagatacgctccgggctcaggttcagagaaagctgcctgatgatcagatttccacgtacttccagtagatgtctgtcagtggagtagagctgcaacaggttgaccatgaaagaggtaaaatagctatcctcgctgtttcttgagatctgggaaaggagctgcagatctttggttacaactgcctctgaagggtcggatagtgtctttagcaaagctgggaaggtaccatcattgaaagcgacaaccttccgcggggctttacggtggagcataatgagccatacaagggccgcaactctagtggcttcattttcattgaggaattggagagtgagggagttgacggcagcggcgtaatcaaggtcgacgggaggaagcggcgtggaaacattgctactacgtggtggtgtagttgcaatggaattatcttgggctgtttgtttctttgtgtcaatgttcgctgtctctgaaggccggactccgggagtcgacgaccttcgctctatagtttctttgctggctgtagtgaaagggagttttgacgatggcgcctgggattcctcgcttgtatcatctgacaaggagtagatgtattggacaagggacgtattgacttggtttgctgcttttcgtacttgatctgagccactggacatggccggaagtacttgagtgagcagccgcggaacgaaaggaagaatatcttcagggctgatctcgaaaaaggcatcaatccaacgaagggccgtcaattgcatttcctcctctaaaccaacgtaagcatatgagaatcagaggggtaaagccactcttaccataggtggtattgacaaagccgacaagaatattaagaatcttggggtggtcgatctgtacatcttgtcccgggatccaatctccatctgcctgagcgagttcatcatcatcgagtgtcgaatccgaggccgagtcagcgacggcaaggtcaaatctgcggtcactggcgccatcggcctgggaattttgccccgtcgcattgctcatcgtatcgctggtgggcgactgtctgttgcttttctgacccttccggctttcctcaatccccttcttcagtcgggtaatcctcttgatctccgataagaaccgatcaagcaaaccttgggttgcaatattcacgtctttgttaggcccaccaaggaacttgatcaatccctccaagaactctggcaaatagctcacgagctccaggtcagggattgtatctagaagggtaagccacgagactagaaagttgcgagtgaacggttggatcacatgaatccgatctttaagcagaggaatgaatcgtgcaagagagaatgccatgggaagttcctgctcatcctgattctccaattctggagtatctttctcagagagctgtaggatcgacacatatgaggcggcagattcagctacgatatctttcaccaggcgatccagaagctccgcgccgttcttgactgatagctctgcatcggatgcaagctgtattgaatgtcagctgtgttacccgaattaaaccgatcgacacctctcaccttagccaacgcgtcgaaaacctcattgaagaacagcaatatctctcccttggctactttggctatgttatacatgctctcgcatgcatagtaccgcactcgtgcatcttgatcggagaagcatgcgagcacaggtggtacaatttcacccaagtatggcgcaactccttcctatatcccaggtatcagcgagtccttcaagtagttatagccaccccttaccgatcctagtgcaatcgaggccgcagccaatccgatcaggcctccattccgggcatggggttggtgcacggcgtatgcataatcgtggcagagctgctcaacgatcttttggattttctcctggtctccttggaaaacagcgtcacggacaatcttctcgagcctagtgtagatagacagcagtcagtgtgggttctttcaagtgcggagcggtgaaaccgagctgacatactccaaggctccctgtttcctcctgtcgtagagcttgtcattcaataaccgctggattgcttgatccattgtcaaagcagcctatgctgcaatctttccccagtatggtaggctaagcactgctcattgtgaatggaaggtatctcagcgcgtctgtttcgcgagacggtcgggagcttggaagttgggtgtggggggtaagtgtgatgataaggcgcacaagcacaaaagcccaaatcgtccggcagcttttcgatcgtggtcacaagtaaaatcctaatgaacaggtgagggagatgcgttggcagtgtggagatagagcggtggtgtgacgtaaggtctgcgcgctcgagccttaccgccttgggctttagctctagataagtcgtgcacctgcaggtgccggattcgtaagctgcgatggaattaaagcttttttatatgattatcttaggtgcggtatgcgtgatgaccataagcaagataaacggaatataagaacaaagaacccaccccagcttcggaacagggtcttgactacttggcgcccccttttagtatacaaaggcaaaaattgtgagctgtactcgtataaatatctaaaagacatccttaaatgtagatataatacccctgatatcatcttgggccaaatagatctaattactaaagtcgtatgttgtatggcgccaaggacagagacccgtgagcaccgactatttttgtactggtgacttgaataagaaaaatgtcaagagataaatgatttcaatcttagacgttgagtatatcaaagtccaagtagatgactatgaaacaagacgaagatgagaagcagcacatgaccaagcaggcatatcgcaggagatatcaagatctaaaatgagaaaccagatcccaacttttcgaacattgctccccgctaacacatagatatcataagactgagacgcaaaggggagtaaacaatcccagaaaagacaaaaaaaaaacaaacaaacagacagggtgactgtacaagaattcgtcgagactccgcggaagcatcacgcaaaggtatagaacagaagaaaaagtcttcagaaacgagagaacaagggtgaaaatgctaaagacaagtagaagaaaaagaacaccgataacacaaagaatcgctcaggcatgtcgactggaaatgttcttcatcgggatgcctgagactggccgctccatcctgatgggcgccagctagcagtggattgtttggatgagccggtactcgtgggcgagcttgggcccgtgtagacatattcgccgtcgacgtattgcgcacccgtggagaagttgctgcggtgcttgcgacgcgcatagcgctgttcgaggcggtagagttcgagttctgctttggtattagttatcccagtatttcaagatttcattgcatttcgcagtgacgtagcatcggttggatgttttttcgggagtcgcggaacgtactggcttgtagtttatcgaagagacccattgtgacggttgaagtgcaaaatgtagcaatggataggcttaagattgggtgttctgaaactggagagagtgtgaaggcgacgatcccacgtggtggaacgcggtggaacgtaacgcgagcggagttatgccggaggaaaaattgacgtctctgtgaagaacgggtcagtccctgacgatccacgttgacgtgtctgggtataaataagaggctgggcttactggataacgatagtggtttcggtaagcgccggtccaaggccgagacttgagataagcaggagtgagggaggtacagggtctatggctagcgggacagcggggttaaagaatgtcgagatttcaaatcaattgaatgagagtaaagagggatacgatttccccagaagtcatcaagagtccacgggtgtcgaggagaagaagagagccttgcagaaaagaaaaggggggtgtggggagactcgactaaattagcgcctcaatatccggagaggctagacaatgcgcatgtgtttcatgtagagatgttgatatctgcgtacggcgtattgatttggttgaaattggtagacgagtatgctgtagatagaatcgaggacagtgccatctaacctgcacctcaccaggtcgaatgtttctttttatagacaccacgcgacgttctcgatgtccagttcgcacagaccggtcgacccgctctatcacgacaatccggactaaactggatttgacaagtggagagagacgttatcttaggaagggatttaggcattgaaggggcatctcctaatctaataccacgtggtcgcaacgtctgtgctgtactccgtaaacggggggaacgggcctatctgaattattgagactagcatttcaataacagaaatataatgtggacttcaagcacatctcgccttcagattgcgaataaggcctgattgcgggtccagcaaacaacgaaggttacccgaattcgtttgtgtacttccgaatcctgtccgttggttttatttcaaggatggatacgtgtaaacagttgctgtgtggagctttgcagatattgtataatagcgtgtttgccgccgataactctccaagatatcaactaggcatgctgactaagtattcagctatcccatctgggcccttacatttgaagccttccatattttttagaagccaattcctcattcctgcctttgtaaattcatttcatatttggcgtggcaaagatctcggaacttccggaaagtgcgggtgcatccggaaaacagaagtgggttatgggtaacctgccatgtctaccatcaaccatcaaggttgacatcatggttgacacacagtggtattttggacggattacctctagaacaccatttatggggtcgtgtttctcaaaatgaggattcagtcgtctcttccgagatttcaggctttgttggaatcttaccactgcgataatcctacttttaatggtagttgtttatatagaccgtctggtttttattgtagcttcgagaagccgatttggatatttcaaatcaatggtgataacagtgataaccatatgcaacaatatctttgacctgaatgcacgcagcaccatacagctcacattcactccttcttagacattttctcgcccgaatctttcagttccatattgccaagttcctctccatccactatctggccgagttcattcggtagccggggtccaagatactgaccccttttagaaaagacatacagtgcgagtacagccgccgtcagaccaaccgacacgacagagacgtagttcatattctctttagtcaccggcatctcagtcgggaggaagcaaaggatgtcaagaagaatcacccatagcaccgagataagattgatggcaaacccaaatcgaccgagcgaaaagggccgctcaggcataatgtgccgaccacgccacaaaagaatagcctgcggcagggcacaggaagtttgcaggaagattacggcggcaccagccatcgcagaaaaggcggttgatgagccgaggaaaatcaggccgtatagctggtaaccggggttagaaatgaccaggctttatcacatgagatacttaccgaaacaatgatgctactcagacagagtgcattcagtgggatctgaaagttagggttgacgattgcccatttctcactaaatggaagcatgttatcacgtgagacagcccagatcgttctcgagcatgtggtgcctgaagtacaagatataagcaagtattcaaggataatcttccaaaaaggagtagactcaccattgccaacggtgcacccaaaaaagcagaacgcgaacaaagccaacagaacagacgaagctcccttagacccggtactttgatagtaaatctcgattaggggaacacccgatggcgaattcagaactgcgtccagatcggtaatggcattcatgcaagcggcagaaaagggaagcgcagtaaccaagcccataaggacgggatataggatgaccttaggcgtgtttcgagcagggtcatggatctcttcgcagacatgtgctccgcagtccgttccaagaaatgcgtacacggcgttactgatcgctagtaggaaggcgaacccatcacttttccaccctgttccatttgtggcatcgccgagtgtccacttaggagcggcgtggtttgttcgactgcaaacgaacagcgtgatcgttgttgcggtgagagtgacacatgcgacgaggactgccgataggttaaggtcgttagattgatattcaataggaagtagagcatggattgaccaacagttcaaacgattgtaaagagaaagaagctgtgagccccaggtattgagtgcgaccgagagccatactatgccaagatagacgagccattgttgccagttctggatctcatagtctggataccagagaaccacgatggacaggattagggatgcaatgaagttgcaggctgcaccgctggctagccaccaccccaaaatgctcaaccagccattcctgcacaatatgttagcatcaaccatctgataggtattggaagcacgaacatgtaagaagcaaaagctcgccaatctttagatgcaagacagaatgcccagtagtactgagcaccggcgactggataggccgatgctaattccgccacgccagccgacagaattgctgtcatgagagcagccactggaagagaccatatagtgccagcggccgaggcctcctgtaaagagataccgattgatgagccagtgccggaccaagtgcacgttagactgaaagagagggcaacaagactgaatgtggagaattgtcgcggcatcgcacgttgatatccgcgagcttcaagatcgatatcatcctggaactttggcgaatgcatagtggtggtatataccctgttatgaatcttttgtttactgaaaggcaacatggcacattccatgacttatatacttctgtaaatgcacaaaaaggaacagcctggcgaactcttcgcctttagtcatcgttatcttcactgctgtttctcaatcaaagcctgaacgttgaccccatgaagttgaacttcacaatctattccctccgctcccgataactcgatggacggataagagcctcgatatcgggtatggatgaggtctatgtaaacgattggccaacactttcacgcctttaccgcttgcttgctgattggtctgtttccaccaccttctttggacgtttctccaccctcagaccgtctgataacctcgtaatatccctagaacgcacttccccaccaattctgcgccattagcgccaggttatttgatatgatttcttccagtccactgtgccctctcaacctgccctgactatcattatgcccccaacagaagtcactcctttccccgcatctgggcgaattcttcctcggcggattgtcaagaggagaggaaccactcgtgagcgcacgggatgtctgacctgccgacaaaggtaaataatcgatctatattctccatctttgctctggtcgatgtatatatacttacttctcccagaaagaagagatgtgacctcggccaacctatatgcaaagaatgtgtgcgcttaaattataggtgtcagtgggaggaccctagagcgttcggcgacaaccataaagctgccccattgcagcaaatcgctcagatcaagaatgaccaaaatagcatgtttcgcctcctgcggaatcccgatcctatcctattctgggtcgatgcgcactccgattgtgcgagctcgtcgagtcgacgtcattttctccgctattacactcaaacttttagcattcttctcaccagtaacatggaaaataattgtttcttatctggtgggtctttggtgttgctccatactttcacacctagtggtgctgactccgtcttgatagcatttctccccatggccatgtatagcccgcccctcctgacctccttggtcgcttggtcttcttctcatttgtcattacgtgatgattcgttcctgcaagttgctactcagaatcggtgcttggctcttcgggatctccgacatgcacttgattccgatttagtcaatgtggagatcacccttgccatgtcgttggtcttgtgctcattggagagcataatggccgataacggcaatgcttggtatcttcatctcgttggcgctgccggggtcattgcctccaaactcaatacgccggagtcactaggaggctccgaacaaatttcggaacgcatgctacgacatttcgcagatgcgtatacgggccgctggctgctgcgcaacttcgcatatcgcgacattgtaatgtccgttgcgcaggaccggccgcccttgttgagctcccatcagcttctaacactggacgagccccagctgcctgattcacattttgggcttgcgtcggagatcttagagattctctcaatcaccagtacactcaaggggaaactgaagaatttgctctctgggccagcagttgcgggtgaatctaaccaggatggatccgatgatggccaacaggctatgcgaatcctcgaaatgatgcctgaatttgcctcgctcgaggctcgccttattgactggaagtgtcccttgtctgcggatatgtctttagcgctcttggctgagtcctatcgcagctcggctatgattcatttatatcgtgtcatgcgctgggcgtgtccggagcgacaagacgagcttttagcaatgactactggtcaggtcgccgcaattgtgagtagtgtttcacagatgccgacgcgtagtctaccggagtgtgcattgctctttcctctattccttgcagggggagaagccaccctagaatcacatattcagtctatccgacagcgaatgcttgatatgattaaatcccggttgtttcgcaacgtggaagtggcgctgtccgtcctggaaaaactatggcggctgagaatggtgggagaatcaatggaaccctctgtgcgaattgactggcttgatattgtacggcaggatgggatctatctttctttatcatgagagatttcatgaagtctatctccttggagcagcttttaatcatgttgtatgtataaaatgacacgagatctaccgcacaaactgatccgcaaagctggcgcccagaccaacctcctcgtagtgcttccgcgctgcctgaagcttgctgaagacatcctcaattcccaatgccttgccgtcaacatccacgtagatatacgcgcccgtcacgtggaacaaggtaatcatctcctgaaccccatcgggcacttccaaagtgtggatgtcgccggggggctcgaaggcatatccaccttcctcggcccaccaagggtgctcaagatagtgccatcgaccccgtagaacagtagcatggacgggtcctgtgtgtcggtggcgtgacaagattccgctcttcctgacgcgtaggatgttcacaaagtatccgtgggacacattgaagcataacggacgaaaccaaacatccttggcctgggggacccaaaaccgctcgtcacattccaagtcgagaacgccggtgactactaagtcgtcagggacactaggcagcttgggaccccgataagctgcggtggaaagatcgcccttctccattgtctgaacagccggcattagttagctagtgtcacaggcgttttatgtaatcgactgtttaccttggacattttggctttgtgatgatatggtcttgatgtctattcggatatgtcggacctcgggagatccctaggtcttatatatacggactcgtcacggtacgtagtcgccaatcttccggcgttaagggcggcgaaaccaatggatacttcaactgcctccacgattgcactaaaatctacaatcttggaataacagggtgggcctgtgatgtggagtggtctttttctggcccgccttactgggaggttagactttcgactcggcgtcaacagcggctttttctagcgtcggtaaatgaagttagaatttgggctacaaggtgatgtgaagttccctcgttataaaaccaaataaattatcctgctatccaggggtttttctcaagctaaccgaattctctgatctctcactatttattcccttcgaaatggccaccgacgagttcgttgcacgttcccacatcctacaccgggcattctccgagcagcctgcgaagatagtgggcggtgatggtatcagtcttatcttagacaatggtgagaaagtgatcgatgctagttgtggtccatcggtatcttgtctaggtcacacccagcctgaggtttttgacgccattacgaatcacctcaaaaatgacatcgcctacgtttattccggctctccttacaccaatggcgcgacagaggagcttgctgatatcctcctcgctgagaagcccggcggtttatccaaggcaatttttgtcaattcgggtagcgaggcgacggacgcagcgctcaagctagcgatccaatactggcacgaacgtggccagcctcaacgcacacattttatctctcggaagcagagctaccatggtaacactatcggcgctctatgtgtctcgggccatgagtcgcgaagagaattttacaaggatttcatgtcatctaatgtgtcctttgtggacccttgctacgcctaccgcatgaagtgggagatggaatcgaacgaggacttcgcgcaacgcttagctcgtcaatttgaggatgaaatcatccgcgttggccccgaccgcgtcgcgggcttcatcgctgagactgtcagtggaaccactctcggctgtttgcccgccgtacctggttatttcaaagccatccgggatatttgcgacaaatatgaagttttgctgatcctggatgaagtatgaccccgtttcttcttccattaaggtgctaagcgctttcagttaagcgcaagacggtgattgactattttacagatcatttgcggcatgggcaaaaccggcactatgcacgcctgggagcaggagggtatacgtggtcccgatattcagaccatcggtaaggccctcggtgcaggatttgtcccgctctccggtgttttgctccatcagaagatattcgacgcgttgtctgcaggctctggtgggctcgcgcatggccacacattccaggtatattactatgggatgcacagttgatggctgaaactaaattggttgttaggcccaccccctggcgtgcgctgctgctatcgcagtacagaaaatcatcaagcgggataatttgatcgaacgagtggcggaaatgggccataaactcgaagcgcttctctatgaagagatcggccctcttccactggttggtgatatccgcggccggggtctattctgggctattgagtttgtgcttgacaagaactcaaagtctgctttcttgcctcgggacaacttctgtggcaaggttgtgaaggtcgctctcagtatgggtttaaatattctcggaaatttgggccacactggtgaataccaggttgatcacgttctggtctgtccggcctacactacgacagaagtggagctcgcgaatatcgtttcgctacttagatcttctattttggagacgactcggcaattcgtcgtggcggagcaacctaatgaaatccccaattgcaaagtcaatgtgaaggttgctgaggtcgggcttgtcgagatatgaacaagagtagctgttcttcttctacgagaaacatgaagaagtccattgccaatttccaagggttttcatttagataatattctacatgtatcctttttcgggtgtttcaatttatttagggaatgatccttatcatagggaatgataccaatctggggtagcaatatttgagtcataagtatgactgtaaacactggcattgggtcctacaggaaatgtgtacaatgtcccaaaactcattattcaggcaatttggttccaatattgtaagacagatgaaacccatttgtgaagggaatatcggtaagtccctctatttcaagcctatggttctcttgttctcctgcgacggtattgcattcggaggattccccgcatttgtcggaggaagagcttctttaggcttagagttttgctagataggtccactctcgcctatttgggctgaaactcgttcctgtatttccagtcgtattcaaacattgaaagcaaacaatgtcaatccagacaccacgccaggcaccgagctaggcgccgtatcatggacgtggacgtgagacgaagacgggcccgtagaggtgtataagaaggaaaatacgtgtgtagagtacgtcagctaaaatgaatagttagaatgtattttttttttacctatagaggatataaaacaatggcaaagcccagaatataaagtgatgatatgaagacctcgcaggcctaggctcaaaaataatgcatacagagtatctcctttaggtaggtgactcgatataataccccatttggcggtcagctatttttgggacgcggcagtttggtgtttgggagcctcaggcgaatgcgcgacgcgtcgacctcatcgcacttgcctcgcctcaaccttgggatcattgtagagctaccaaagttggtgtatttgttttatctattttgggataaatgtaagtcctcatcttaatcgttttcaagtccatatgctgacatgcctggaaggtatcgacaacgcccggccggtggcgacgacagcgtcaagactcccttacaaccgaaatctgttaatactcagaactcgatcgaccgacttgtaaggccatttaagtgtccagggagtgcaacacctactcgcgcatctgagaaaccatcaagaaagagacgaaaggtcaactatgccaacgccgacgggagcgtggaagatggagcggagaagccatacacgaatgatgaccggctcgctttggaaacaagagaggccaacagattccccgcgtataaaccgagggacaaagatgtggcgttcaggtcacgatttcaggttccgttcattaacaaagccaccggcgaatacagttccggtcgggtggctccaacattggggatgcgacaaggcgcgacatttgtggtcaagccacttcatgaccccagtggagaatttgcgattgttctatacgaccctacagtagacgacatcgaggaacctgcgcccaaaaacccagaagcaccgacggaggatacaccaacattggatgagccaattatacataagagtctagcagacattctggggctcaaaaagaacgtggaggaaagaccaaaggtgcctgtcgtgattgatccgagactgtgcaaagtacttcggcctcatcaagtcgagggtgtgaaggtattgcgctccgagataagctgtgccatgggagaagagctgacactatgcttacgtatagttcctttatcgatgtgttactgggctggttgacaagaacgccaatggatgcatcatggcagacggcatgggacttggtaaaacggtaagattgaccaaccatgtttcataccttgcttctaacgaacacagcttcaatgcatcgcattgatgtggacgctactcaagcaggcccccgaggccggaagaactaccattcagaaatgtgtcattgcatgtccgtcaagtttagttggtaattgggccaacgaactgggtgagttatgcgtaccctacttcttattaacttgactgaccgtatcagtaaaatggcttggaaaggacgccaccacgccttttgcgatcgatggaaaggccacgaaggctgagttaataacacagattaagcaatgggccattgcgtcagggcgtggaattgtcaggcccgtccttattgtgtcctacgagacactccgtatgtatgcggacactttgaatgataccccgatcggacttcttctatgtgacgaaggtcatcgactaaaaaacaaggaaagcttgacatggactgctttgaataaacttaatgttactcgccgagtgattctttctggaacccctatccagaatgatctgtctgagtacttcgctcttcttcacttcgcgaacccgaaccttctcggctcccaggccgatttccggaagaggttcgaactaccgattctgcgaggccgggatgccgcaggcacagacgcagacaagaagctaggagatgaacgcttactggagctctctgggattgtcaacaagttcatcatccgccggacgaacgagctcctctccaaatacttacccgtcaagtatgagcatgttgtgttctgcaacatgtcacaattccagcgcggtctttacaaccatttcattaagagcccggagattcaaagccttcttcgcggcaaaggcagtcagccgctgaaagccattggtcttttgaaaaagctttgcaatcatccggatctgcttgatctagcgaacgaccttccaggatgcgagcacacgttccctgaggactattcaccacccgattctcgaggccgcgatagagaaataaagagttggtactctggcaaaatgatggtgctcgatcgcatgctagcccgaattcgacaagacaccaatgacaaaatcgtcctcatcagcaattacactcagaccttagatcttttcgagaggctttgccgggcgcggggttacggctcattgcgcctcgacggcagcatgaacattaagaagcgcacaaaactagtcgacaagttcaatgacccagagagtccggaatttatattcctcctaagtagtaaggctggcgggtgtggattgaatctaatcggcgccaatcggctggtactattcgatccagactggaacccagccgctgaccagcaagcgttggcacgagtgtggcgagacggacagaagaaagactgtttcgtctaccggttcattgcaacaggctcgatcgaagagaagatcttccagcgccagtctcacaaacagtccctctcgtcatgtgtcgtggactctgcggaagatgtcgagcgtcatttctccctcgactccctgcgagaactcttccagttcaaaccagacactcggagtgacactcatgacacattcaaatgcaaacgctgccggcccgacggcttgcaatatatcaaggcccccgccatgctgtatggtgatactagttcgtggaaccattttgtcaatactggcgagaaggggccacttaatcaaatccaggatctgcttcttcgtcaagagagtggggagcaggatgtttcggctattttccagtacatcagtcactgatacacttatttggcatacttgggcaggttcggagttactacattattgggcacattgtatctttggagtgtattcatttgggaaggaacaatcatgaccatagaatgatttgatgttttgttgtatcatcctgccgaaaaatgataatatttttgcattcaagagcagtaggacttaggtacttagcaacgaagctcaaagtgctctatatatagccttgctgggccgtgcgcggcacttggacttgtaccgtgaaccaaagctggcgaggcagagttcaggcagatagatggagagaatgcagaccatcgaaggttaaatataaaaaagcgatctatacttcttatgtattctaccgggtctatattgtacatcttagggttataagccagcgtgtctactccccaccctctcttatatatttctatcgtctttctatatatcacactccaccgagaacatagaatcatagaatatagtcatcctcccctacagcgacgattctgtcatcccaaactaatttccgtgtaaccgagatgactatatatatatctggtaactacaggtgtaacatcatactatagggtacgatccgccgttatatgatcgcacatacaggtccaggacacacccccgctatttccagcttctatactgcgtagtgcatcaatgaaccaaaggcccgcaatcacttcaggatatggcccatctgcctcggcccgccccggggatgctctactggtatatattcaccggcacgtgatgggccaccccactatggaaatctggggagcttggaatcattaccgtttgtgtcaagaatcttcaatctggcccttggagctgacatctcatggccgcagacttctgggctggctacatcagcggggccattgggatcatcatcggcaatccccttgatctcatcaaagtccggctgcaggcgggacactcacatgcagatgcatcgcgggcacaattgagccgcttcgaaaaagcaagctctcttgttcgaggtccgtgccaccccgattcagcgataccgatagcaaaatcaattgaccatcgttacaggcgcggctgctccgatcctaggctatggagctctcaatgcgattctttttgttgcttacaaccgatcgctagcagcattggacgggtccgtaacggatcccaccaatcccgtgggggtctcggcttacaagatctggctggccggtgcggtaggcggactggctagctggaccatctcctcgccaacggagttcatcaaatgtcgggcacagctggatcgccggccagatgtctcgtcgtggacggtcgccaaggatattttccgaacgcgtggttggaggggtctctactttgggggcttgattactagcgccagagattcgattggctatggattctagtatggaaccaacacgccactcccggctaccccagtgtatcaatctaggagatctagtgctgacgtagcgcagtttttggtcctacgaactttgcaaacgatttatgacctcccacgatgagggttctcaccaggctgctttgaagattctgctttgcggtggcattgccggcgttgttacttggggctcggtgtttcctttggatatgatcaaaacacgactgcaggcacagacaattacggattatgcgcctgggactgagagccaatctctgttacgttcacagcgccagacgttgaattccttccagattgcgaaggaggtctatcatgtcgagggtatcaaggctttctatcgtggccttggagtctgcagtgtcagagcgttcattgtgaatgccgttcaggtatgttttctgctcgttgtcatgaactaaacaactgacatctgctagtgggcggcatatgaatggttgatgaagagctttaatcattcctgggatgcgcaagtgacaagccaggagcccatcgcgggcctgtaaccaccaccgaggttagaatatagaagatctaaaacacatcaacacagcagcagccaagctacgcagttaccggggtccgatttaggttagattctatttggtattgaggtatttatattggaattactcggtagtattgctagtaagggggtaaatttcgcccagatgttgtgttttcgccgatagtcggcagtttcgagtcacccgcaaaacggaagagcgaaaccccggcgagtatcggcaatataaaaaataattgcctcacgtgatactccaccgatatgcatgaggaaagtcatcagaatgagtctagatggattgtcctggaaacttttgtatgtcgatttgcgtacatcgattgctggaaagggtatcatggtcgcgtggcaaaggtttgatttttatcccggaaggcgaaggtcaagcttcgcttcactccttcatctcgtcagaattttcttcgcgcttgccgttgtcgatgagacctagtccgatcgcacgctcggcaagcaattggctgtgaggctcatcgcgcaggatgcgaagtctaagggtagctagttagcgatgggatatatcatataagacaatgtgcgtcgggcactcacctccgcttgtggttctttcctcgggcgtgcgccttgaggttgtagtcactctcaaaccatttggcgcactctgtgcagtagaacttgcctaggccaggcaggtcctccacatccttcgagtccttgtacttctggaggtgacggggagttttgatatccgcgacgacttgatcgtagtctctgtgggtgggttagccaaaaataggtacacggacaacccctatgccagacgtaccttgtgcggcgcttgttcttgactttcctgagagcacccattgtcacggatagccgaaatatctcggagctggagccgagcagtatcaaaatagatgcaagggaatgaaaattggttatcaccgatttccggagtgaacgaggtgcaaagcgggtcaagagaggcttcgaacaacaaaagcgagtgttcgagacgaaatttccgccgattgtgggtcctggccagcgattgaaatgcacggccgctgattggctggcgatcagagacggcaccttgatgggcgatgtgggattgccgttcggctcacctcggcttagttgatttcgtcaccgtacatcgctgtatttaatgacgtttgcatgaggtatgtggtttgcgatatgtaattcgagtctacgggttgaatggctacttgaatatctacatagataacgtagatctaggtgtcggatatactataggatctgaagtcctgtccaggtaaatctattaatatagcactatatcgtggcatcatcgactagtaaacagatgttgatcattggcgggcctcatccctatgaaacccatcaaatccacatgtacgtcaagctatcttttgacggatagcacggggtacaggccggaagagttacctgaaggcacattgaccattccagagccctttggtccgaaatgggagagctgggcgaaaggggccatgtaattggaaactcgctgattggtggccgagttatacccgtcacatgccttgtatcgagattacggtcccggtacatccccaggcaaacacacaggccacgaaggttgaatatgagaacttcacatagggaagacaatatggagagaaaaaagatcggctatacatcctacgtatgagctattgtctagggtagtaaatcctgaaaaaaatccagccaaatctcgagatctctcggctattagcagcctctatcaaattgcccagcccgtcttgccgtcgcatgcggcaggcttactttagtacaataccaacgtatcgtatcgccgtggtaacagcggttacggctctactcccggtccccgtagaacctttctcccactcaaaaccaagctttaatcctcttcttccttttgatctcttcttttctcatactactctccactctcatagtttggtgaatagctcttggatgtgcaatcccatctcgtagagcttccatcatgatttctacacgcctcgcgcgcgctggtgcgctggtacgtcttccctccctcagctccagcttattattgccacatggcaataatcctgagtgccagtcgattcttgatagatggataactaacttgtcttgaatataggcccctaagttccgtcttgtaagcaacgaccttgtttccaggcttccaaaacatgtcgcatggcacttttgctggcgtgcatgatagctcggacatagctacacctgcagttactgacttttcaatgtttagatgactggaagccgggccttcgctactaccgttgaccccctcgaccagaaggttgagatgaccaaccacgaacatgtgagtggctgccagcctagcgcccagaacccggcgtggagtacgattccaagcaatagcgactaacctatttcatattagggtcactacatcaactacaagaagatgtccgagaacctcgccatcgtccgttcccgtctgcagcgccctctcactttctccgagaaggtcctgtactctcacttggacgacccccacggccaggacatcgagcgtggtgtctcttacctcaagctgcgccccgatcgtgttgcttgccaggatgccaccgcccagatggccattctgcagttcatgtccgccaacatggagcgtgtccagacccccaccaccgtccactgtgatcacttgattgaggcccaggttggaggtgagaaggatcttgcccgtgccaacgacatcaacaaggaggtctacgacttccttgcctccgctaccgccaagtacaacattggtttctggcgccccggctccggtatcattcaccagatcgttcttgagaactacgctttccccggtgctctgatcatcggtaccgactcccacacccccaacgctggtggtctcggttgcgccgctatcggtgtcggtggtgctgatgccgtcgacgttatggctggtctcccctgggagttgaaggcccccaaggtcattggtgtccgtctcactggtaagatgtccggctggaccacccccaaggatatcatccttaaggtcgctggtctcctcaccgtcaagggtggtaccggtgccatcatcgagtaccacggtcccggtgttgactccctgtcctgcactggtatgggtaccatctgtaacatgggtgccgagattggtgctactacctccatcttccccttcaacgaccgcatgtacgactacttgaaggccaccaagcgtcagcacattggtgacttctctcgccagtacgctgagtcgctccgcaccgatcccgatgccaagtacgaccagctcgttgagatcaacctcgatgagctcgagccctacatcaacggtcccttcactcccgatcttgccacccccatctccgacttcaagaacgctgtcaaggccaacaagtggcccgaagagctcaaggtcggtctgatcggttcttgcaccaactcctcctacgaggatatgtcccgcgctgcttccatcgcccaggacgccattgaccacggtgtcaaggccaagtctctgttcaccgtcacccccggttccgagcagattcgcgccaccatcgcccgtgatggtcagctcgagaccctcgaggagttcggcggtgtcatcctcgccaacgcctgcggaccttgcattggtcagtgggaccgcaaggacgtgaagaagggtgaggccaactctatcatctcctcttacaaccgtaacttcactggccgtaacgatgccaaccccgccacccacgcgttcgttgcgtctcccgatctggtcgtcgccatgaccattgccggtactctcaacttcaaccccctcaccgacaccctcaaggacaagaacggcaaggagttcaagctcaaggctccctccggtgacggtcttcccagccgcggctacgatgctggccgtgacacctaccaggctccccccgccgatcgctcccaggtcaccgtcaatgtctcccctacctccgatcgtctccagattctcgctggcttcgctaagtgggatggcaaggatgccctcgacatgcccatcctgatcaagtgtaagggtaagaccaccactgatcacatctccatggctggcccttggttgaagtaccgtggccacttggacaacatctccaacaacatgttgattggtgccaccaacgccgagaacggtgaggccaacaaggtcaagaactgcttcaccaagaagtacgacgccgtccccgccactgcccgtgactacaaggctcgtggcgtcaagtgggttgtcgtcggtgactggaactacggtgagggatcttcccgtgagcatgccgctctcgagccccgccacctcggtggtctcgccatcatctgccgttccttcgctcgtatccacgagaccaacttgaagaagcagggtatgcttcctctcaccttcgtcgaccccgccgactacgagaagatcggacccgaggacaaggtcgacctcctctgcactgagctcgccgttggcaagcccatcactttccgtattcaccccaaggacggtggcgccgctttcgacattcccctccagcacaccttcaacgagtcccagttggagtggttccgtgacggctctgccctcaacaccatggcccgcaaggctgctcaggcttaaatgcgcttctggtgtcgtgactccccaaccttaaaaccttcaagtgtttcggttatcgccgagacacctgtgtaaactacgttctcttgtgtgttgaacaattcagatacatgcttcttgaaaaccacggtgtcacacggcagctattggattagttggctattgcccgtgttctcttttcaagagcaggatacgaggagttgcgctctgggaaaaattatgatgaacttgtgtgtttttgtaggcctgtttttctcggccttgcgttgattcccgatatctgggtgggctcaatggatataactcttttgatttttacatcactgtctttgtatgttagaaatggcatacatacacaatttccttttgtttttttcaactggttcctttcatagatcgtagatgtctatacaaagtatctcaaccgtggtccgtcatagtagacagccatgaatgtcccagagtaatccacttgacacctcggaggctcggacacatccaaggctgagataagctaccgaggctcagtttctgccccgcgtcggttggacttcagtataagattgacctggacgccatcagactgtcttattccgtcattggttcgaatttagtactttgatattttcaagtccacctctacatctcattgcaaacctatactatcgaataagcctagagcatcttgcatgataagccacccatcagttgaatgctgatctgcacttcaggacagatataaagatcgggttgttgagaatcctcccttccatctactatctccgcctcattccaaaatatggcgacccagctcgtccagcttccagaagtggagcgccttagcgcctcagtcgtgaggattttaggcgggaatccggggaaggtgagtgcatagatgccatcaagtcagtataccacagcaagctgatcgatagcaccaacgcaatacagttcacactccaaggtaagcatctcactccctcccaaaacccagaagaaaacacctaaccataagccaggcacaaacacatacttaattggtcgcggccataagcgaatcttaatagacacaggcgaaggcaagcccacatgggcagcaaaccttcagtccgtgctctcagaagaaaatgcaatagtgcaccaggctctgctgacacactggcacggcgaccatgtcagcgggctgccagatctgctcagaatctgtccccaggctcagatcttcaaaaaccagcctgattccactcagacggatatccaggagggccaggtgttctccgtcgaaggtgctactttgacagcattccatacgcctggacatacggttgaccatatggtatttatgctcgaggaggagaatgctatgattacgggtgatagtaagtgcggctcttcaatccaacccttcgatgaaaatgatatacaatgtccctcgaaatatctaacccaaatctacagacgtcctaggccacggtacatccgtcttcgaggatctcaaaacctacctcagcagtctgcaccggatgcgcgaccgcgtcgcctcaggccggggataccccggacacggggcggtgatcgagaacgccggtgcgcggatcaccgagtacatcaagcaccgtcagcagcgggaagacgaggtcctgcgcgtgctgcgattcggtaagcttgatgtcgcggatggcgagtcggcgccggagcacaagcaggcgtggacgcctattgagttggtcaagcgtatttatcgggacgttcctgagaatttgcatttaccggcttcgcatggtgtgtcgcaggtgctgttgaagcttgaggatgaggggcggacggttcatgattcggactctgggaaatggagtcttgtgagtgagaagtcggccttgtagttgtatagctatatagttttattcgctatagaaccgaaatgggatctaactagatacgttttgtcttagaataacattcgacgtcagcactcggtcactcgtcttcctggctaggccatgttgtacaaagtcagaatgaccaaaagacgaagaatttactgtcgaaaaatatctcttttgaatcgcatagaaattatagcacgatatccccttccctttatatatttccctgcagtccatgtgagtgatagaggcccaccggtagttccaacaattccaggagtgacgttcactttccggtcccccgctttgccctcacctttcaccttttttctctccctccacacactcgccatatcttgtttggtattactgctagcaggtattcacctatggagatagattgctagtttggtgctcatccggagtcaatatccacttgttccaaaggttggttcgcattcgtcatgatctccaagggtttccccgcctccaaaaccgactctaatcgcatgttcgctcgaaactacagggtccactttgcttcgactacaacttacagcccttattctaatccaaataatcccatcctctgctttcgcccggcatccgatccatcaccatgccttccgtcgagcccaagcatgaagctcgcctgcttctggtctcaaaccgtctgccgatcacaatcaagcggtctgatgatggaaaatacgatttttcaatgtcctccggaggcctggtcagtggtttgagtggtctctcaaaatcaaccaccttccagtggtacggctggcccggtctggaggttcccgaggacgagatccccgtcgtgacacagcgcctcaaggatgagtacggcgctgtaccagttttcattgatgatgagctggcagatagacactacaatgggttctccagtcagttactcctgctccccgcaagcccttggaatgtacactgatattcgttcttccggatagactccattctctggcctttgttccattaccaccctggcgagatcaccttcgacgagtccgcctgggaagcttacaaggaagcgaaccgtcttttcgcaaaggctatcgcgaaggaagtacaggatggcgacttgatttgggtgcatgactaccacttgatgttgcttccggagatgctgcgcgaggagatcggcgatagcaagaagaacgtgaagatcgggttcttcttacatacaccgttccctagcagtgagatctaccggatcctccccgtgcggaatgaactgctcttgggtgtcctgcattgcgacctgatcggcttccacacttatgattacacgcgccatttcctaagcagttgctcgcgtctactgttagtataccctacgcggcttgatgttcatatctaaccggaattagtggtcttgcaactacgcctaatggtattgagttccagggcaagattatcacatgtggagctttccccatcggtattgaccccgagaagttcaaggaaggtctgaagaaggagaaggtccagaagcgtattgctatgttagagcagaagttccagggtgtgaagttgatggtcggcgtcgaccgtcttgattacatcaagggcgtgccccaaaagttgcacgcgctcgaagtgttcctcagcgatcacccagaatgggttgggaaggtcgtgcttgtacaagttgccgttcccagccgacaggatgtcgaggagtaccagaatttgagggccgtagtgaacgaactggtgggtcggattaatggaaagttcggtacgtatttccctttggtgttctgaacgaggctaatcgtctttcaaggcacggtcgagttccagcctatccacttcctgcacaagtccgtcaacttcgacgaactcatcgctctctatgccgtgtcggatgcctgcattgtctcatctacccgtgacggcatgaacctggtggcctacgagtacatcgccacccagcagaagcgccatggagtgttggtgctttctgaattcgccggagcagcccagagtctgaacggtagtattattgtgaacccttggaacaccgaagaactggcaggcgcctaccaagaagccgtgaccatgagcgacgaacacagggctctcaattttgccaagttggacagatacgtgtccaagtacactaggtacgtcaccctatccctgccaagcagccatcctgtatctttcgtatctcgtatttggttcccgactgaccattctctagcgcattctggggccaatccttcgtcaccgaactcaagcggatatcagcccactctgccgataagttccaatccaagaaattggcggaaacggatccgagcgaaagacatgtgccaccccaaacgcacgcgtaataatctttttatgtttctcttccgagacatgttgttcccagtttcctggtgctctgctgtcggaacgggtatttcaaatgaaactagatggccttcacgaacatggatgaggcgaaatgtattttcttagaggttgtttggttctgcttctatttttgtcttcttaaatctgaattctgtatacaggttttccttctagaccagacttatacagagaacatatcccgggttaatgtatcttccgggtcggcgggagatctgggcagaatagaatatccccatacaacatatggccgtgatgaaggacatctattatgagcaaacgaatcagactgggttgtccctggggaagtttcttaaggctttaggctgtaactcgcatgctgttacactcttgccttttcccccatagagctgcctcatacttggtgagctaggcgagatcaatctttgatgtaatcagactattttacttgagcctggtcataaattgcttattgtgcaaagtgatactcaggaggtcagtcacgtgcatattctgacagctcattccagccctggaggatacatgtactcactaaacactccaatcagtgagcaattctgatcactcacctgccctaatagaaggccctgttttgttttgatcgtcttgtattgttaattaggatgactttagttcggcaatcatttcggaaaattaccccccctggatatttgttttgtccaagacggtccttctctcaagccatctccctcccatcacccatagaggaggaacaatgtcctacttacaatcctaagaaatattatcccgctcgcattggggagaccgttggtcggtatcgcatcgtttcgaagctcggctggggtgctagttgcacggcttggctggcacaagatgtttctcggttagtcgaacaattagttctcagtgccatatcttttctaaaaccgcgaagttggcgatttcagtcgccccgatacgtaaccttgaagatcacaaatctcagagaaggggaaaagaaagccacggaagaagagatagcaatctcgcagcatattgctgccttgaagtctgataatgaagctatacgatacgtccggttgatcaaagagtcgtttttggtgcaagggtctaacaggcaacatatttgcttggtattcgaaccattacgagagcccatttggtttcttggaagacaccctgggagagtcggcgtgcctccaaacattgtcaaggcatttttgcggatcttacttcaaggtctagactttctccactccgagtgtcatgttatacacactggtgattcactaactgtcttcctaaaaatcgtgttgactttctaactggccgcagacctgaaagctgataacttccttattggctttgaacacgctaatgttatccaacgatatgtccgccagcaagagctcgatcccgcaccgcatgtatttcggaatgggcggcttgtatatcattctagaccagactttgggccactgacgaagggggtatgtttaataaagatctgtgacttcagcgctgccgtcttcgatgattgacaacaccacacaaccatgacatccagcctataccattctgcgcacccgaggtccttttaaaggccggttggacttatagcgctgatatatggaacttgggaacagtggtaaatagccaagagtgagagagacctatcgcatattggtgatacaacactctttggtgcaggcgcacagcattccctggaggcgcacgttgcgcaaatgataagacttctaggtccgcctccctcgcaatttctgaagacatgtgatccatctatatgtggtcgtttgttctcagcccagggtatgtttttgccatattccgagatatgatggactctgatttactcgcatgtgtaggggacttcaaatttcctgatctgattccatccgaaagcttcaatttctcgaatgtggtacctgctgtcctcgaaggggaagataaacgtctttttattgagttcgttcgcaagatgcttcaatgggaacctgaatgtcggttgactgcaaaggaactttatgatgacccttggcttcatatgttgtagtgacaagggggtcacagctatcttgtgtacaatttgtctctggctttttagggcaaggtttattatttacttcaaatcaaatacgaggcaagccgattgggcactatgtggcattaactaactaccctgcacaatacatagctggccattcaagatatcagtaagccctactctgcccgccagcatattggctgtgggtaagtcaatctgatctggtgcatataactagctcatcatgcatgctgatcaccaagcagttcattatcccaccgcccaaatctcgaaatcccgttctgaacttctcacgacaccaaaagctgtagactaccaactatgccagaaactttccgtttctggactttttgtgtctccgaatgttccgctgctgctgcgatcgatgtcggtctctgcgaacgctgtaagcagcatttttgcgccattcacgccatcttagcaacccattgttgcaaggtacccgcatcatgtaaactccgactatctgaggcgttctaatccgaccctagaaataccctcttgacgaagatgaatgggcggctgcacaaacagaagaagtaacagcccttcgacacatgatgaacgacgaaatccttcggcgtcgagcttccgaacgcaacggaggcctcaattgtgaatttgatccctcagaccctctaggacagaagcggatgtgcggcatgcatatccatcttcgaatcatttttagcaatggaacggcctggcttgctcgaatactgcggcataactacacctcattctcagacgactttagcaatctctgcttaaagagtgaatgtgctactctgaaatggctcgaagatattaacgtgccgtcgccgaaactttacgacttcggtctgcggaacgaacccgagattaaggttggagttgcgtatatgctgatagaggaactccctgggacacctttacttctccctagcccgtcggaggagcagttgcgaaaactgtacaagagttacgccgacatcttgtgcactatctataagtaccccattgaccaaatcggtgctctctctttacaaccagatggtactatctgcataggccccatcgtgggcgatcgctcaggtacattttcgcagataggacctttcagcaatgcacgagaatactacacgacatgggcagagaaatatctcgagatgatctgcgaccaccagcttttcacaccgtactctgtcaatgcctacttaatcttcaaatacctcaaggaactggcgcaacaagggcagtggaatgcgtttgaatcgagtatcgacaatggccccttcttcttaaaacacatggatgataaaagtgaccatatacttgtcgataaggattacaatgtcactgggtttatcgactggacgtttgctagggcagtgccgatgtatgcggcatttggtccttcactgttgacagcagatatgaacgatatttaccaaggcaaggctgggcatccccgggtgacagaatcctggccgaggctatacagactagggacaagtatttggctcgctttgtcagtggccctgacctggttcgccgcttctcctttgctctcggaatgggcatgtgtatgtcttgggatgaagcagttgatttgttccgaggcctcatatctacggctgaaggtatcggctcggagtttgactgggatgtctggcgtcaaaatcgtatagctcaatgggctggtgatgggaggttgcaagcccttctgcttgaattgggagaaatctagaatctcgatatttgaccgaattgagtgagtagcagcaagatcacaaaaatttgattctgattgtcgtgatggtccacaagagatatctatgagagccgaactccgtcgtattagatattttaaagacttgcaaataatcagaagtgtacatacaatttctgaaataaaatatgaaggtttgctatcaaattgccctgtcagtcgacccatggatgtcttatactatggtgcaaacagtgcaaacatgcttccccgagaaattctcgaaatcctcaactgcaaacacctcaagctcgcaaccatttgggcggtcaccatcaccaaccacctgcttgaccacctctaattactcgtcctctccaattccacccaactacaattggaagagcaaccgcctgctcccccaccaacaatggcaccaagccatctcctccgggcaacaatgcctctccgagcctcaatcacgacacctctgtccctgtcacgcccctcaattctccaatcaatcacatacctcaccacgcccctccgcaatgcctcaacaactaccccaacccctacacagccgacgaccaccgggacagaaacaaaagcgccctcccgactgcgcaaatacgcctcagccctgaagaccggcaccgtagtctccgtcggccgcatggaccgcacagtgggcgtcagccaccgccacaccctctgggaccgacacatccgcaagttctaccctcaggaaacgcactacctagtgtccgatccccgcaactcgctccgcaacggcgacataatcgagttctcgtccggcgcgccgaagagccgaaacgtgcaccacgtcgtcgagcgcatcatcacgcctttcggcgatgcgatcgcagaccgtcctcctgtgctgtcgaaggaggagcgcgaggctgagcgtgagacgcgctgggcggctaagtatctgcgtcgtgagtcgagacggcttggtcgtgaggtggatcttgtggaggaggccgctaaggcgggtgttccggtgcctaagggtgaggtgctttctaccgcgcagctgattcatcgcattcatgcggagaatgagcgcgtcgggaaggttaagaagcttgtgcaggagagactggcggaggctgagagggttggacaggagagtgtgaaggaggctaagcaatgagcagttggcttctactgagaagtgtacgtttagctctttttgggacggacttcagtatctgaattgccggatttgtccttcggcctctgtggtgttgcatatcggaggtcatgtactgtattataccgcttcaatctattttcattggcattgtgatatgctgtattcctggggtggattttccaactaaaaaactaaagataggctgaagtatgtatgagaagaaggagagccatcaacatcaaaaaaccaaaaaaccaacaatggacatcgtaaacatgggtttagcctagacggaaccgtctattccaatccctaatcatttggaaacaaaaaaagaaagtcactggtatcatggaagaataaccaactcctttacccagaaacggcaaactatgcccgccaaatcccgaacccaccccggcaagagacgcagtgctccccctagcattgggtgttgcacggcctcatcttatttccattgctcgctcgaacatcatgccgcccagacccggaccttgagatcaacactgccagtggccagaacacatcgaatggacatctttgtcgcattagggtcttccttcgccccattagacgcagccggggcaccgttcgtaccctcctttgcaccggcatccttgagcaaaggcggtgcccaccggagcgaactgataaagtggtcgtgggccgcgatcgtacgcacacacttgcattcttgcgtgagatcccagcaccgcatggtcttgtcgtcagataccgagagaaggtatttcccgccaggatggaagaccaatgagcggacccagttgtcgtgaccaacaagggttttgatgcagtttccgcgggtatcccagagacggatagtcttatcgcgagaaccagtagccacaaactcggcggacgatgatgctggcggtggtttctttagccccgcaagagctgcgaagtgagggtagcttgttgccggagcgaaggctacacactcgatataatgttcatggcccaggaatgttgacttggtatcaccagacgagatatcccacagacgtgcgactcgatcgtctccaccggagaagaggaaccggccgtctggggatggtgtaacatctcgaatccagtctccatgtccctgcatggatttgacacagtatccagttgtgacgtcccaaatgcgcagtgtgagatcgcgagaagccgagactagcaggtttcctgacatgggagaccctgcagctccggatggaatgaaccgaattgctgaaacactgtggtcgtgtcctggtagggttcggatgttcttatactcgtcagccgggtcccacaatttgatcgttagatctgacgagcatgatgcaagaagtgtgcctccacgcggtccaccataatcgacgtctaacactgccctggtatgtcctttgattgtgcgctctagttcacccagctcccaatcccagatcttgattgtggtatcatcggaaccggaggccagtgaagagaatactggatggaaagcgaggcacgatactggcgagcggtgtgattggaggtcatgacgcgctggtgctcgaggcagccaggtaacggggtcttggtttttgcgattcagcgaagtcggggttgcggtatccagctcggactggagtgcagcgcatcgtgcttccagttccatgatctataccaccattgcaggttaaaaagatgtagacgtgttggtatgcccggtcgtcgcacctttttctgtaaccggactacactcgtccatttcttctccaacaggccttcatatttctttagtgtgctctcgtcgaccctgatcgagtcgcccagttcttctcgtaaagcggcggagctgtggtgcaaattcacagaggtaaggtaggcgatcattcctttatgtctgtcgcaaaacaccatcagcgatcacccctaaaggaaacagatcgggtcacatacagctcctccgcctgccgcgttgtgagaagttggctcatgatgttatatgtgctctctgttctctctgctcatccaaatgcgcatataccaagttggttcggaaaactgcgatggagggggagtggtgtgagcggtgtcgaggggagtcggggggagttagagggaggttagaagttggcaattgaagaattgatccaagagaagtaagagaaaccgaagaatagagagaaagagaagaagagaagataaatatgaagggcacgttgtgatccaccgcggggaggggagaacaaaacaatcttcgccaaggcttttgtttactttcctccaacttcaactgttgattttctttaactcctgttggtttcgactattatcagccactcctttcaatatacaatttggcactttgactgagatattcatgttctggtcaagatcagtgtcttattaaagcaagacaagtccgtctttgataccctttgggcatcaacccaacacagtacgaccatctgaaccccccgagacaccccggaagagcccccgcaacaccaactcagagcctttatatctgtccccggaactctctttgatactatgcgcacttctgctcagataccgcagaacgtgctgactcctttttttcctagaatccgttgataattcccgcccgtcgttagaatggctgaagtcccagaggatttctcctccttacccttgcccgaccggttcactcataaggtgcgctcatccctgcataactagcccgaccgataggattacggaaatctgactccgatgcacagaactggaaagttcgaaaggagggatacgaagatgcgaaagcgcaatttgaaaagacccccgatgaatcagatccgattttcggaccattcatacaagatcccggcttatggaaaggggcggttgcagattccaatgtcgcggcacagtctgaaggtctggcagcatactgcgcgtttttgaagttcggaggagtccaggcctgtacgaggtgcgtcaaccccgatcccagtcgcgacgcctgaacccgctgacaacattcccatttacaggagccgcacgtatacaattggtcctattgctgagaagggtctcccatctacacgaccggccggtaaagcctgcgcgcaagaagctattttattatgtgtcgaattagacaaggccgatccagtgatcgaggagctactacctatgctatcacacaaagtacctaaggtggtcgccggatctctcgcagttttcaccctcatttatcacaacttcggctgcaagattgtcgatccgaagcaaactttgaaggcgctgaccaaggtttttggtcaccctgataagaatgtccgcgcggaagcacaaaacctgaccgtggaactctatcgctggcttcgggaggccataaagcctctgttctgggccgatttgaaacctgtgcaacagggagatttagagaaactattcgaaactgtgaagcaagaccccacgccgaagcaggagcgattcacccgggcacaacaagatgccatggctgcggccagcgctgcaccggcgggtgaggagggtgaagtaccaactggggacgaatttgatgaggaggaggatgtagtggttgttgatgctttcgacctggcggaaccggttgatgttatcaagaaagtaccggaaaacttccatgatcaattggcctcgtcaaaatggaaggaccgcaaggaagcgttggacgctctctataatgtgcttaatgttccccgaatcaaagatggtccctacgatgagatcgtgagggggttagccaaatctatgaaggacgccaacgtcgctgtcgccacgatagctgcgaactgtgtggacgtgttggccaggggcctgcgcaacggatttaccaaataccgaagcaccattatgtcgcccatgttggaacgtctgaaagaaaagaagacgactgtcgcagatgctttgggtcaggcgttggatgctgttttcagcacgtcgacccttacagactgcttggaagaaatcctcgagtacctcaagcacaagaacccacaggtcaaacaggagactgttaagttcttggttcgttgcctgcgtacaacccgcacggtaccagccaaggcagaacagaaagcgatcgccgatgctggtacaaagctattgaccgagtcagccccggcaatccgcgaaggagctgctgaaattctgggtacattaatgaagatcctgggtgaacgggctatgaatccgtatctcgatggactggacgagattcgcaaaaccaaaatcaaagagtacttcggaaccgctgaagtcaaggccaaggagcgacccaagcctattgtggcacctccaaagcctgctgccccggctggcaggaaggtcgttggcaagaagccggcaacggggctgaaaaaattagcccctgtagctgctccacctgccccagaagaacccccggccaggccagcagccagaggcgtcccttcaaagctcggtgctccgagggccggcggccttccaactcctggatcaggtctcaaactgcaacggaaacttgctggccccggaagcactgcgtcgccggcaagacgagttgctgcacccccagaggaagatatggcccccccgccagcagctcccaaattcggtcttggccgtggacttgcgggtcggcctattgccagaccgtcggcgcctcttgagcctcctgcccctacccctgccgccaatgctttggcagatgccgagcgtgccgagttagaggaattacgggcagagaaggagaacttcagccgaaccgtggaagatctgaagtcggaacgttcgaggctcaactcaacgatcaccgaacttcagaatcagaatgcacagttgattgaggaccacacccgcgatgtcttgagcatcaaggctaaagagactcaacttgttcgcgcacggagtgacgcggaaaccgcagagggaagtgttcaaaaacagcagagagagatcgaaagattgaagcgtgaactcgcgcgagcacttcgcgcgtctgccgtaagcccacctaacgctggctccgacgcaggaagcatgggcatgccagacacaaactcgatgtatcaagatcacatcggcaatggcaatgctgcttcacgatctggtctccacatggggtcccgcttcgaaagctcgcgtcctcgaagctatgcctctgccactcccagtgaggaaagggagaacaacgggatggaatcgccaggacccagtagtcgcaatggcggcctaggccgacggaacttgagccctacatacaactactcggccatcggtagcccgacgcgctcatccgtccgaaactccaatacaaatttcaacgaagacgatcagcagcacccccgatcttctgaaccagcagagaattggaagcgagccgcagaggtcactagtcaactaaaggcgaggatcgaacaaatgaaggtgagttgattgtttatctgattacgtatgtcttgtactaacaacaatgcaggtacgccaagggctttcacgacctcctcaacgttaatgaccaaatgaccgcgatcacgtttatgtctcgtccttcttcatgctatacaccttcttcgcttcaacctgtgtctttagatggggtttctccgtgtcatcattcatattaaaatcggcggtgagcatatctggtcttctgggagcatggtggctggctgagcttttgggtttctttgtactttttcttttttttttcctctcttagctttggccttggacctctgtatcttgctgtaatttcatcataccagcctcgtgttctcttattctgctcatggatattgattcctagtatttagtgtaataaagctgttattgctatcttgctagctctctctctctctctcgtgtcggctctatttttggaaacataagccgtcgccttctatgactggcctgaataagtgcccctcaatgatgtgacggtgaatgagtgctgaagtggcactagtggacgagtataaaacccactaagactacccctccttccttaatttcttcttacttctcacatccctcttcacatctcctcttacccctttacttcatatatcaattcacaatgggctggttcgatggtgactattccccttatactacctcgataccaaccttcgactaactcccatctctagatgactccaaccaggctcaggcctacaacaccttcaacggccagcaagagcacgacccctccgtggtccacgagctgattgccggtgccgcttcctacgaggcagccaaggcctacgagaaccacgttgctgagaacggtacgtagatagccccacccagctgagccagagaaaaagctaatattaatttggcaacaggcgagccccccagccacgagaaggccaaggagatcctcgctggctttgccggtgcctttgtcgaccgtgaggtcgagagccgcggcttggacttcgttgatgccgagaaggccaagtaccaggccagacagcaggtcaacgatgcttatgacaacaacggaaaccagttctagataacgaccttgtgggtgtggcatgtggatatattgtctgtatctagtccagttatgttgtatgtagcatgtgccggagatgtgtttcaggggggaataacccctcaatttcactctcacctaccgtattaccccacctgatcttgtagtgttgttaaatcttgaataaacggtctgcttcttcgatgcaggtccgtttgatagcagtacatgtatgtatgcagatgatatgtgccaagacgggactatcctttagaaaaaagacttggtattcttggcaggtgtcaggtcgcatgaagtcggagagaagggagaaacggaaggggagaaataaattccccgattcagcgaaatgtcggtcaagagaatttttaaccaccgtctgcctgttgactctttagacagattacattaacatcatacagattaactacacttgacaagatcatctactaatttactacaatacgaagcagacgacatgaatgcctagttctgatgggctacgaagaccatcaatagattgaacaggtagaaaaatgcattcatgggtatctgcagaaaggtggtacatgggagttcgtgagagaaaatgtgtctttttttgttagaacaggatccaaaaagtgccaaaaggctctttcgcacccatctaaagctaaaagatttggccgtcaatagatcgtcaaagccttggaacaccttgtcgtttcccataacaacttattatttttgagcgcttcgattagaaacgatcccgtcaaacagacatcaaagaaaagctgtagttacacaagcttaaaccttgatggcggcatcgagagccttacgcttcttctcgatgcgggcgttggccttggcgcccatgataccaccaccccagtggcggcgggagtcctcgtgcttgtcggtgtaaccctccttgatggcggagaggagcttggcgaactcggccttgtcctcagcgcgggtctcggtcagggcgagaacggcggaggtcttcttgtggacgactgtgccgagacgggccttgcccttgacaatggcgtaggggacacccatcttgcggcagagagcgggcaggaagacaaccaactcaatggggtcaacatcgtgggcgatgagaacgagggaagccttcttgttctcaacgagtccgacgacgtggttgagaccgtacttgacgtggtagggcttcttggagacatcctccttcttcttgccgtcggcgacggcggtggcctcctggacgagacgctccttcttctcggccttggtctcaggacggtacttggagaggagcttgaaggtctgggcagcggtgttgcggtcgagagtggcctggaactgagcgatggaaggaggaaccttcaggcgcatgttcaggatcttcttctggcgctgaagacggacatactcgggccacttgacgaagcgggagaggtcgcgacggggctggatgtcctggccgataccgaagttgcgagtgcgcttctcgataagggggttctgtggggggaaggttagcatcttccaatgcactcctactgggaagaaggaaaactaaccttggcagccttcttgccagcgccagccttgccctgggggtagggcagagcggcggtcttctttccggacttagtaggaggctatcattgaggaagaagatcagcgtgctgttcacatagtgctgcatcttctttgaactctaaggagaacatgagccaagccgtgttacgggcattgactccatgcttccagccatatcatcacacgatgcacgacacatctctttcgaggctgtgcgcgatcggcggaattgcttagatcagagatctgaagcaaagcgaatatcgtgagacatcgcgagagaactagaagaagcctctgatgttatcaagagacaatttgggtactcaccaccattttgtcgactgggattgcgctgattgacggttgacggatgagaaagggaaaagttcgtgtggatgcaccttatgaagtttctgtgggtcacgctagcgcagtcatgtgattagggcctagggcaaacggttagggcagatatactcggccacgtgacagatcacatgacatcggatatctcatattctggcaggcgcgctgagacctcaggctttaattcccgtaaacaccggaaaccccaaaatcatctgatatttggaccccttttgatttctcccaaaatcgatcgacttcgattgagacgatgtcgaaatacagtcttctattccaatgataggacgctaatcatcgggagtacggaaagatcgccgctactcttctccaactctgaattgggcatggcgcgtttctccagggctacgtggaccccacaactggcaagactttcctatgatgtactaccccgttttcgagtgtcggaaactaataatgtatcgcaatatagcaaaccctgcaagtatcctcctaaggggagcaatccagacgtgaacgagaacccagctggttcaattcggtctagcctacgactggattcccgttctcatagcccaactatgttgtactgagtcgggcaataccaactgttcaccaatttcatttcttcttccacgtgcaatgcgtggatgataacggcacaatccgcatgggactttatgtttcacgaattccaaaaaatacgtgaaatttcaacgagtcaacccgctcaacctttccgatgactcgctgtcggtgacgcgagaagagaaccaataggtcatcactaactccttggagataggttcgcacttttacgctcgactaaagcaattttatttccgaccgactctatatttattgcattgacttccgacttacccacgaaagagtcgaagggcacgacgcaaaaaaagtctagaatgcattatgcctgacacacaatatcaaccaatcgcgtgcataatgctagccctcctgttttctaggagtggcaaggctgattctccgtgggtgaattatatataaagtctttgagatcggtggagcaattcagcttcaaggtttctcttagtgctgggagtcaatatctctactccttcgtcggtatctcacaaaggagtagatcagccctgcattctacgaaggggcatcatgtgtctttgatacaagcacattttctgttgaagagaaaattgtggaggtcgtcgcagaattgcgaaaagcaattcagttctagcgtggtctcctatgaacgcagcagaaggagaaatccttaatgaagtttttctcttttcggtttcaccggaagcattttgccaacgcgccacaggaataacaaatggcggggatacttttccgaaatactgcctaagcaacggtataattctacgacacttttgtttcacggagctactgtgggggtagtacaataatgaatccctcgcagtgagttgaataattgtattatatttattcatgtaccactgactggattcccagggataacgagcagaagcttccttagttatgtcatcgcgggcgagcatccgggtccttttgggtggccgtttcccagatctttaggcaataactacagattcactttccagaagattgagcttttttctgcaacaggtttgggcacagaaacattgaaaaggtttgcgcgtatgggctgtttagtacatgatattccacattactggttagagatgcgtacagactatcttaaattaaagactcggagcttggggcgatttcatagattaactgcttttcctcaatatattactccggcactactaccggtactgctctaggagaccctcaatgcgtactatttcggatttgaaccagttggcgaggcgtggatcacctgatacctgaattagactcgcggccatgttgtattggtatctcatttgcgtcaacgccgagaatgcggtttcctggtaggaacgaccgagttcggcggtgaaaagaggatcacagctcatcagacgccaacggcttaaatcggtaaagtactctccgacttgaataacagtggcgaattcaaccgccaggtcgaactggtttttgcctagaggaatggccatgcggacggcattccgaagaccgggctctgactgaatctccgattggatatgcctgagggggttgcatttgatggagccttgagtgcaaatattgcagtcaaaggaggcttgaatacgcatagtctatatatattatgttagaataccagggtatctagaatgataagagatactgactgttagaggctccatcttcaaaatgcagtgtcttgatattccacaaagctcatactctggtgcacaatcaggattcggagtgtatacagccagtaaatgagcctccggcaaaggtccagagacagtgggtaggtcaggaggcgagggccagtagatgaagagaatgagcgaaaagagaggggggccagcagaaatagagaggggtcagccgagagacagggggccagtagatacagagagaagaagtcgacaaaaagagaggggttcggctgaaagacaggggttgacttcatggtttttcttttattggacgaaaatgaggatgccagctacgtccgatgcaagcccccgtatggagcgaatcacgttaagggccaatctgcgagaaccagccattcctcgacgtcccgccagcttggaaagatcaggccgaggactttcttcgagcgtaattccgtgaatttaaatccactcgcatttagtatatgaacgtacgacttgggggtccatacttggagtagttctgtgaggctcgtccgcgacgtaaggtttggattgacatggagtgccggaatggtgctagtggcttatgcgcttcagccctctagaagccttctagacacttttagggccttttagggccttttagagccgtttggggctatggtttggcttgaaatttaggactttactaacagctaccacaatgacccacttcgaatcgtataaatagttacacccttactatatccagcggtcgtggctatgccacgtagtaggctaaacccgctctttgccgagtggaacgtcttctaatatattagctataacggttcggagaataggctattgcagatagtccttctagcggatttccatgggcattctattggaaaggttaactaggcgtccacccgtttcgatactagcgaataccgggatagggcgcgcggctatggttaggagaatgcaaattgtgggctgatcgtagactgaatgtttagcagattcctctacctttgaacaatagtgagcctgagttgttcggacttccgggatgaaagttgtttccggagagttgcttgagaggagaagggaatatgctcatgaaaaatatgctcatgaaaaccggtttatatacatcgaagaaaatgggtatttggctttacaaactccacaatgtacaatcacatcactcaacataccatttaagggcattaataaccgacaagtatataaaacatcattcccaaatcctgccaagcaagtctagaatgcgtaaccagaacgccttggatagatcaaacgggacaccacggtcctcaaatccatcaatatgcaggtcatcgaagagaaagcatctgtccatagatcacatcacctccacgctcccaacccgggcaaagccccacgacccaaactggtactggcagcctgaacagcctttctcttccccaacgatccctcctgagcacgcacaccagcaatgatcttctctatatgcgtctcaaccacaacaccaccgacaatcatctcgccgagcaccgcatgcagggtctcatagccgaagatcagatccaactcgcagacattctcaaacatccgatccagcgcctcgacaaacacctgaatcagatcaatcagagcgagtggggactcggtcgacgtagagatcataatgaacgacagcgtcgcgtaggtccggtatgtgatttgggtgggggtatcggagggcccggaggcggtggagctggcgccttgcgagaggagaggagggagtgggaggaagttgcaggcgcttgctggacgctgcgcgactagacggtatatttgcgcgatcagggattgctgggtttgtgtgtcctgttcctggggttagtggtgtcctgcgacgggtgagggcgagggcgagtgcggcggggtatcgactcaccagctgtgtgtagaatttggtcagccggggttggccattgttattgaacacgaggactgcgttgatcattttgactgatgtgaggcttggaacatgggcaagctggagagagtgtcagtcttatctggatgcgatagctgatgatgcggttcgggagacttgccccgtgcgtcgatctggagaaattgataccaacatctacatttttttttattcttggctttttgtcaaccctttgttgggtgttcgcgagtcataatgaactcaataccagcatgcaggaatcctgcatctaggatatcattatatacaaccatacgggccctatcctcggcctctaatccccactccaagcgcgaactcaaagacctcaccccgaccgacctctgctactactgggataccagacccccgaaagaggagcaactagcctttgccgataaggtattcacgccatcgcgtcactcgccgctcaaactctggtccgccgccaaattccgcaccacaccattcgcatcagtcgagccggaagtcgcattcttgggccgctcaaatgtcggcaaaagctcactactgaacgcaataatgggacaggagatctgctggacatcgtcgaaaccaggccggacgagggaaatgaacgcgttcgggattggaggtacaaagggcggcgagtcgaaggttgtgctgcttgacatgccgggatacggaaaggcgagtcgttctgagtggggagcggagattatgaagtatctccagggacggaaacagtgagtcatgatgcctgtcaacctaccgacccatggtatgtacaatgactgacaaacatgttatagactccgtcgcgcattcctccttatcgacagcacgcatggcatcaagcaaacagacgccgaaatcctcagactattccgacaccacgcaattccccaccagatcattctatccaaggtcgacaagttcctcgttaaacaattgaagcagataaagactggggtcacgcccgccaatatcgagcggctacagctcttgctccagggcatcaaacccattgtgcagccggacccgcgggcttcggaggggcctgggtctttgggtgagattttgacctgtagtgccgaagcacggattggtcctggccgggcgctggggatcgatgctgttcgttggtcgattttgtcggctgctggtattgatgggagcttgcagggtggccggcttgctgtgccgcctcctgcagagacgccggctatcttgtcgtgaagggcatgccttgttgtccgaattcaagtttaaatggagagaagtactccgtatgttgtaatatacatacaccccccaaacctactaaatgcttatctacaatatacacacagcactgttggctgacggtgtaaattattatgggccccttggtgacctccacgtgatctagttaccataaatcatcataactgatgcatacaaacattgttaatgaagctattcagagattaccttatcaattcgtctattaattccggatctgggtagtattggtaacaaggtaaactcataaaatgtttcgaaaccacgataaggtatacatttcgaatcaggttgaagcaacaatacaacaatccaataacgccaaatgacacgctaccgacagatcgactgtatacacagcggagtaagctgtaaatctatttcttgcgggttctgtgacggccgtcccatcaaagtctggaaatcaatttccagtgcatcaccagacaccactccattcctgagcctggccgactgagtacactccagggcgtgagtatgctggccactggtagtagccccaactcttcggttgacaactggggtccaaatctcgatatctgcatcgtgagacctaggattggcggagacaaggaccacaagctgggtttggtgatccgagttggagtaccaccagcgggcatccacctgtagccgagggacggactcggataggccgacctctagcacaagagagggccatggtataggtgccccggcggccggttccattccaggggaaaacgatgcgtctgcctccttactgcacatacgaccagctgatcgtccagcccctccaagccaaaaatcatggttgatgaagctcaaccccatattactaagagcatagttaatccaggtatcaaactgacggcttattttctcatggtagtggtacggtatgatcttatataagatcatatgctcgtggtagagaattgttgcgcgcaccccttttggaacgtcagggtgttcaataagcgccgaaaaaagatcgtccgggatccgttgtaccagaaggtattgcgagctaggagggtcctctgacacaagctttgttttgagtacgtcgagataatcccagagctcatcgagagaggagggtcggtcgaggatattggcggttagaagggttgtaggatcgaccccaaggtcaatactttcggcgttagaggatggaagagataaatcggcgttaccagaaggcatagcgagatgggaggtgggaggtgaagaattggatgggtaggaagtctgagaagtttgatgaacggagagaagagaccactgatcgaaatccttgagatggagatagcaagatatgtgcttggatacttgtagagcgtacggagtagttacgacccatgatgattgaacttacgtcacaataactcagcctcgaggtgtttatcctatggtccatgttggaaacatttgaatgcttcgctacgagaaccagcagccgtaagcagaacacatgtactatattacaatacaacctaaacaccaatccaactcatgacacaatttggaacagatcataggtaaccaatctattatgggcagtccgatacggacaaagcaagacgaaaaatatgtaaaagaatcaccgatctggcaggcaacagaatgggaagtcacataagcatcaggcaaagagaaaacgtatggatggcaggatgcatggggataggcaaatatttgggaatacagaatgatagaaacctccacataagagatgatgaaagatatgaaaaaaaaacgcctggtcccttatcgtaatgctgcagaaccaaagaatgccgaccgcgctatgcaaaggatatttttccgatggaagacgagagctgtaaggatgggtatcgtgaatgggggaatagagtgagaagagaagaaaagacagaggaaaggaagttagtataaggagaaaggttgtcggatgttgatattgatcgagggcagaaaatgcgtgctaagcatctcaatcagacaagtcgtcatcatcttcgatcccgccgaggacctcctgcccacgtcggttaacgacaatgcgttttgcaagcttgctttccgggactccatcccgtgcagcaccaaagtcgagaacctaggtggaaacaatattagcattaatcattggaatccctcattagagagaacttacttcgatataagtcaaactatcacgttgcaccgcggcaacacacctccggtcattgaacttgacttgccacacgccactaaggtctgtgaggaggtctcgaacacactcgccgtttcgcacatcccacatcttcagcgtccggtcagacccggagatgaccttctgtccatcgtgctggaagcaggtgatggcaccggtgtgtgcgctcagggtgttcttgcagtggccatgcacggagtcccagattcggagggtggaatcagcagcagcagagacaaggaaatcgtgctccaaagcgagcaggccaacgagagacgtatggccttcaagattatataggatggctccatcatctagtgaccaaactttaaccatgtggtccatggctccactaatgcaacgattgcgcttatggtcaagaaccacgctatacactttcatcgagtgaccctgcagagtatgtaaagtctgtccggtggaaaccttccagaccttcaccgtgcaatcgtaactaccactcacaagggtatcaccatgggctgcgattgcacgaactgagtgctgatggccggagagcacacgcaggaagtatggacagctagcgtcatccaccgtaggaccactctgatagtagactgggtcaccgggtttgggaagcttccacacccgaagatttgagtcacgagacccagtaatgatcaatggttctttgggcatcatctcaagctgaccatctgcattcctacctacctcggcaggcagaacgatttgcaagcatcggactgtggaagtgtggccgtggaagatctgagtacacctagcccgctcgatgtcccagactcgcactgaacgatcggtggagccggagactagcgtgttgccatgatattcaagagcccacactccaccttcgtggccctccagcgttgcctgcaacgcgcctgttttagtgtcgtacacgttgatgtttgtgtcatcgcttcccgtaagaaccttgtcggcgtcgaattgcaggcaagtaacaacatgacggtcatgagcacgaaaagcgatatgttgcggcttaacatccggctgcatccatcccttatggatggcaacatggcgacggtacagaactttgaagaggaacagcccacgaagagatggtagacccacttcggcatagggcaccgacccagctgcagcgctggcagcggcgtacggggcttctgacgcggcaatgtctctcctccagtctggatcggggagttctcctccactggatgagacctttcgcttggcaagcttccggcttgaagcacgtgtgtttgctttccgcttgccccgtcggctgattggcaaagaccctagagggcttctgctgctgggacccgccatcgaaggaacaggggacccttccatatccgccctggatggagtcaaaacgctgaggtcctcctcatggtcttcagggccgctggataactgccatccccatccctgtcttatagcccgttctagttctccatcagagagatgataaccatcttgctcgaggagattcctccagctcttttcatcggaattcgtaatgtgtctccacctcttagacacctgcgcagcacgacacatcgtctgtacgtcaaggtatttgacgatgttgagactaagctcaagcggcagaagagtcaggaagtcgcacttcaatgttggattaacgacatcggccacgaaatgaagagtaggtttagggcatctccgaagaaattgatacatgagatacgtcttgacctcatcaggcaccgaatcaaaaaactccaataccttgggcatatctaagagggagggaggggaccgtgagcttgcgagagaatggtcattcacccgagtctcatctgcatcttgaagccgcaagaccttagaaaaacgcgagacattatgatcgaggctggaatctgtatcaacgtcaagcccctctgattcgaaggaggattcgccatggagggcattcatagcagcaaccggtgagagacttgggctcgggaggcacatatcctgcgccatggcattgtctattgccgatagttgagacataagctcgggtctctcttgcattgcagattcctgtgttccatatgttgtatcatgaccaaatgaggctgattcatgtgcagttgaacaactctcatccgcttcagtagcctgagattcttggtttccggggtttgaacgaatcccagaaaatgcattctgcaagtaagaaccttgattggatgcctgtaagcccttagctccgatttcagatgagagaggtgaaggcaaaggaggttccctgcgcggaaacaccgagctgtggattcttggtcttgggggcacattttcgccaaatccgctcaggttgctttcggtgtctggggtggcaaggccggcggcaagatgagttgatccgacgccactttggcgagtgcggcgtgtgatgggctcagaaggagcccgtgttgagcgagttcgtgggagaaccgagggtcgagtatcgaaaagcgtgacgggggatacggcacgacggcgagtattgaaagggtggctagaaggttgactcgctattctcggaggggtcagccgccgagtggggttctcgccctcggcgatgaacgagttcacagagcgaatcgggccatttgaagattttaacgcctcgcttttctccttgtactatatattattatactgtaagcattggattcgactagaccaagagggtaggataaaatcgtacctcggcggcagcatttatggtatcctcgggctcgttaaagatgatggacttctcgccgatcttgaacttgaggttccttagagccgctggagttggagatgaggcgagagggtactgtcggacatccagatccttgacggctcgcggggggttgattgtcaacggcgggaaggaggtagtcgtggtggtggtggtcgtcaccaccgtagtccgggtagtcggggcgaaggagaactgtccgatggaggcatttgatggcccttggcccagctcctctctttcgtccatttcacgttttcgaggacgaatgaatcgagatcccgggctgtgggtcgcgtgggaggtcgcagatacggatgcgttgtggtcagtcaaagccgagtcgacttctgatatttgaagggagctgggagcatttgaagtcattgtaaagcgagctcatgtgcaagaggacaaagaactgtgaatgtcccaaattaactttttttagcaaaacaccccctcagcacggtacaccagcaaaaccatcgatgcaaagggcattcagcacatagtgtcaagagccgaggataatcaagttgttaggggggggaaatagaacacaaataatggaagcaaggaagcaaagggaaggggagaaagaaacagtggcggctgagaaggagttggggcggagaacaacatttattccggttcccgtggacgatgtcatggcccaacgtgcaacatttggattctttctgattctttgctatttagctgttgatttttcatatattagacctgttaccttgactactgtctacggatgtgaaatgccaaatgatccgagtgtgaaacctggagaaagggcccctggttctgctctagaccggcagaactgattaccagatagaggtgggaccgaggagacactcagataagccggttgacttcctcttgcccagcgcctttataacgtaataaccaggattctattagctattcgcccctaaatcataacgtaatcggtaagcgagtggccactgtaagcgagtggccaccccaccccannnnnnnnnnnnnnnnnnnnnnnnnnnnnnnnnnnnnnnnnnnnnnnnnnnnnnnnnnnnnnnnnnnnnnnnnnnnnnnnnnnnnnnnnnnnnnnnnnnnnnncgtaatcggtaagggagtggccactgtaagcgagtggccaccctacccaagagtatagttttctaaggtaaatatttcaaccagaacgccattaaattaattaaactaaaaaagatcatttatctggacacctattgatcttatgccctgtctttccacacccactacaccttggtgcagcccgtggtcgtggttctaaccctgattgagtgcttccgcccggggggtgtaggggtatttctaatgcttccaccagcctagcaatgatttcagaagcttcttgaactgagaggccttcttcggcgggtatctgccgtctagatcgggcccgcttttgcttcttattctcattttcatcccgtaaatccttgttttctttcgctagtaaaatagcgctatgcattgcaagctcgcagcctttgataagttggtttaatgcacgtttagaagggcttattaggcttcgagattgggttcgaagtaaagctttaatagacaaagcctgtcgacgtagatctttgctattaaaaggggtttttggggtgaaattccggcttgaatcgctaccccggcttagggggggggttggcgttcgaagataaatattaagttttaaaagtacccgattaggtaaaaaaggtattaaaccagctgctaagaagctatttttaattgtctccaatttaaaagcttcaatttatacggaggggtatacttcgaggaatttaagtttattaatatagttaatcctagtccgcatttttatcttaaccaaccggccatataaccgttttaccaccgtaaaacaaccgatattaagaggttataaaagataagaggaatacagtagtatataaattagtataatatcgttttccttataaatttaatcgaattgaggggttaaatggcttctatagctatcgagtactaaaagtcgataccttcctactatatataataaagttgatagtataaagagtttctaaagctagcgaagtccaatttcatctgatatctatctatttagactaactttaaagtgctagttactaggaaggccttcgaaccataatttaaggaagaccttacctttaaaaataatatatagagggaggacctatcctaccgcgtttatacatttaattgcagttacctactcgcgatttctaggttgtaaaagtaatctccaactgtagtatttacttcttattataacctttgccgttatagttaatcctattataaatccagtctcatcgaagttataaatatcatctaggttaatcccaaattaaataatagttttttaaataagattaaactattctccaatgatttttaggtctttacacttcgcgcgcttataattataacatcttaagaaccgagaggaaagaagagggcgttgttttatgaaattgtaaacctatttttcgctaaccaaaatgactagggtagttccgcgctttttaagaagaagattcgccatttcttataccatagagggccggggagctgatccacgagaatccatagagagaatccatttttgaagagattcctcttcaattgtagtcaatttagtcgagttggcgcgagaagtcgcgcggcattgtattccatcgaggcggcgccgaagggttgaacgcgggacgttaaaggtacgggcggcaatagaaatattggtaaattcttgtttcttaaaagcctggatagctagtaagatcctaccctcctgctctattgaatctttagaggattgagagcgaattggtggcatggtgggtggttgaactaagtaagtgctaattcatggacgcgtttttgggtagggtggccacccgcttaccgtggccactcgctttccgannnnnnnnnnnnnnnnnnnnnnnnnnnnnnnnnnnnnnnnnnnnnnnnnnnnnnnnnnnnnnnnnnnnnnnnnnnnnnnnnnnnnnnnnnnnnnnnnnnnnnnnnnnnnnnnnnnnnnnnnnnnnnnnnnnnnnnnnnnnnnnnnnnnnnnnnnnnnnnnnnnnnnnnnnnnnnnnnnnnnnnnnnnnnnnnnnnnnnnnnnnnnnnnnnnnnnnnnnnnnnnnnnnnnnnnnnnnnnnnnnnnnnnnnnnnnnnnnnnnnnnnnnnnnnnnnnnnnnnnnnnnnnnnnnnnnnnnnnnnnnnnnnnnnnnnnnnnnnnnnnnnnnnnnnnnnnnnnnnnnnnnnnnnnnnnnnnnnnnnnnnnnnnnnnnnnnnnnnnnnnnnnnnnnnnnnnnnnnnnnnnnnnnnnnnnnnnnnnnnnnnnnnnnnnnnnnnnnnnnnnnnnnnnnnnnnnnnnnnnnnnnnnnnnnnnnnnnnnnnnnnnnnnnnnnnnnnnnnnnnnnnnnnnnnnnnntatcctcttgggtggggtggccactcgcttacagtggccactcgcttaccgattacgttacatatcatggtcattcatccaagttctatcaagtttctgatttgccatcgccatgcatcacgtgaagtgggggcgtgcctcgggtggcttcttggcacggggcgtatctcattgttatgaagaaatcatttcccagggggctcattgggcagacataggggtacagaataatcatcgtgcagtccattgtcccttactactgacttactctatgcatgtcatatactctccaggtgcaatacccaccggctgatatctgcaataacaatgtctcgcccctccccacatcgatttagggtttggttgcttttacgtactacacctctccagccctacctctaatgatatccttggatatattcgcagcgttacacttgatttgacagatgacatatctagaggaatatatctggacttgggtcaatgaatcatctggtcccttgtttgctggaaatccgatacgagacaggattatgatatatattccagggcaaagtgacgttatagatgctgacgtagaatgaaaaaccaaatggtgaagacaaacatgaaagatgactagggccctaatacaatgggatctgagctgtgtctatgaatagactcgctagttccaaactttgttaatatctaagaatgaaatatgtttcactcgctagagcttgccgtttcctgatgctaagactccgagctaagcaagacacatcttctacaaaaatgtccagatcctatgatgtttccgagtttgctgaatccttagacgacccatcgataatttgcggactttgtaccgggagaggacgacagcggcttccacatctatgtttccttattgtgtttctttgcctaacatttgtttctcttcgattgatgttcatgcctaacatatagaagagtcggacctagagtgaattcttctttctgcctcatccggtggcgaggctcactttccttcggtggaggaagctaacgacgctgcagtgctcccttctgacgaacttggattcccattcacatcgaatatcttgatgaagcactcattcgacccgggcgcacagacaagaaagtgcattttaagctcgcagatagggaaatctcggctcaaatttttaacagagtcttcaagtagacacccgaccacaatcactctaagaagcaaatgggcgacgagacgattgcgaggcttgctaatattttgcttccaacgtgccagatcagggtttcagataagatatacgttagaaacgagccgagggtaagtacaacggagagacaaacgtgcattctcccaagtagaactttccgacgacatttgaaagtacctagttgaagcaccttcccctctcggcgtagaaggccttctccatatttacaaccacgaacgaggggattgccaatgtgagatttatgtataaatcaggaccgtacaagaaatgcatgtccaaacagactcaaaggagttttggctgagatatgcatatgttgtatgaaattagtatgtaggttgggttgggtggaccactggcttacacgtgtcacgtggatctaaccctatttgtggcagatctgcctggaggcttatgtctaggcccctctcaaccccgcccttgacctgcactctatggcatctatattatcccccgactgaacgggcgctacaattggcactcttggcgacctgagaaccggggaatcgcgggattaaactgcgaggctgcagcgagtttcagtctctggctcagcagggcaaaatctctccgggcaaaattccatcggatggatggtgtcggtccgacccgccttatcttatgcacgttcatgtccaacgactgtttggaaatgtggtgtctagactcgtacggcagaaattgaaagactgaaggaaagatggaaatgtgcaccgaggatgacatgagtagcagggattggctactgcaaccatcatcgaagcgtaacgcaggtctgcagtggatgtgtacgaatcaactgccgtctttaaaggagtggagcggaatgaccccaagggatgtgatgtgtctgaggtgaggtgcgttggtcatagccatcagcccaataccctttcgctgaactgcccatccccaggctagcggactgatgaccatttctctttatgctttgcccttatgctttgcccttatgcttataactcattcctgcaagcaatattaccggactgaagagaggtttcgcagcaagcagcagcaactgttcacggcggggagcggaacccgctggacagcaccgggctctgcctactgtccctcgatggcggcggcgtgcccggacgctcgaccctgtacatcctgaagggttgatggattgactgaaccagacacgccccgagggtgcacccgcaaagaaaccctgcaaggtgtttgaccttctaggcggcactagtacaggcgggtgggttgattcagtccatggtataatatcggatggcttacagatgtagattgattgcaattatattaggtcgattggggatggatgtcgatgagtgtattatggcgtacatcaagtttacgaaaattatttttgacaaaccctcaaaacggggcgtatccagcctttttggtaagattaagccccaattcgataccgacaagctcgagggtgcaaccaaagaagtcatcaatagctatagagctaagccgaccgatttattcaatcatcaagctgacccaggttgccgggtgtaagtgtatatgagctaatggtcccgtatcctgctaacggctccaggttcgtctgcagcataacgtaggagaccagggagatcgtgcaccttcgcagctattccatacgcaacaagcctggaattccggccaccatcagccaggccgcctgcgcaacctccgccgccacaaccttcttcaagccggtgtctattggggcacgcaaattcgtggatggtacgctcggggcaaaaaccccgtggatgaagtggaagacgaaacgtctgacatctggtatgaagaaacaggtgacctgaagccgctggtgaagtgctttatcttgatcggcaccggcaaccccgggaagaaggcgatggaggacaacctactcaagtttgtttctaaaaccctgccaagtctcgtcacctaaactgagtatacggagaagcgattcatcgctaaatggcgacagcattatgatagcaagcgatatttccgaatcaatgtagatcaggggttataggacattgggctggcagaatatcaggagcaaggcttgattgaagcagcaacagagggatatctcgaccaccaggcagtggcattccgagtgcgggattgtgttgagaatctgagatcaaagtagagtgtgtatttagaagattttacatagtcctggtattcttcggctaacggatacgagacgtgattgatagggagggtcgatgctggtatggatgtacaggcaattttgtgcattttatgcactttatgcactttttgaactcttgcgccaaaatgatgtcaagtctcacgatttggaaagtgggatgtgaaatgtggaggatttccctgatttccatgattttcgttccatgatctgcaccgaagacaatagatcgacaatagaggcgtatccgaaaccctgggacgagactaggctattggagtcgactattggcgaccatcaggggttaaccgcatgaccatccgacttagccgcctaccaaaccactagctgttccggttgactgcgcttggggtgaatgtggcgctcggagtattttcttttcttttgtctttgtgtgtctgacgagtattcgaaggatgtgttgttgttctacatatcggagtcggagcggcagaccgaaacccgctaattacgtatacggaggttgatcggcgttcgtccaatcgatctcggagatctcgatctgagtgaaattgcgccccggagtgtcatcgctgcttgttccgcctcgtgggtcaaagacgcggcacatgggctgattcaatacaaagtttgtctatagtgtttgtgcctcctatttttgagaaattgcgctcgcatgtttgacaccgagtcttacaatataggtaaggtccctataaaagcgccctcgcgatcttggtgacacccgtgaattgtcaaaccgtgttaaactgtcagtcgcaaacgatcagattcatgtctcagtatcttcccgagtatgtagcacatgcgaaaggtggagtccgaaaggagcccgcatgcaagtcgatcattgccagttcctgggcctttggacgtgtatccatggaacagagagtattcttagtcgaaacatcactgcccagggttcgagggggcgattacggagtttatcctccggacacgggctggtatttgtcatggagcacatcgagtgggggcctctatcgtattagagcggttctgaataacaagatctcagaatacttcgctccggcgcattgataaacgatcgatttgtcgatctgctctcagacgcgaccgcaagttccagctatggacttggtgtcgctcaaatatggatactccatagttcgtggctctagacttgactagactccacattctggcgatagctccgtgctgtgtgtgttttaggaaaaagcatccatgtgagtggataggacaagcggattggtacctgaattagtggagcagacggagttataattccaattagcgacggcaaggacgtgagcagacctcgtgggaggcgtcgatagcgcaaactcacggacaatgccacgttcttgatgtgggcgttgactattttttttaggttgcagataccgcagtaaggggtaaatgttaagattcgaagtagtatatgtacggagtatactaaggaataatagtgttatgcaaatgcatgttatatagcatgatatgtaggttagagcatacataacccctatcacaaccttggatatcacatcctacacgaagccctaaaacttcgtatccatatactccgtacttccagtatttctaatattatatgtcgatcaactctcgagagaccgtgctccactcgaaattaaatttggaataaatgaaacgctgcttttcagcctatgaggattctttaagacatcggtggagtctcccccctttaagcgcgtgaacaggaaatctttcaaactcatttgcctgttctgtactacactcgacgctttcgtacaaaaaacatccgaatcccaactgatcacgcattttggatcttttatttttaccaaatctatacatcccttccccagtcccgagtcaatccttaaacagcaaacgtttctttctatttctgggtacgttgcggttcagcccaatttcccctaaattgcagactaagtaactaatttagtggagtagattcaaccgaagcgagatacttgaaccaggaacccccccgcttacacaatttgcgcattcagtccaaccattcgcatcatacgattcatgcgcaattgaactgcgctctgtctctcccaccatgggacaccgagaactcacaccggtccatgtgccacttcgaacgtcgagtcgcaaaccggcacaacacgaaccaatgaacacccaggaacagacccgagtcgaccgacgaacctcgaaggcccaaagatttttcggaaccgatatatcacttcccacggaacatggcgggtggcaggagcctccaaatgtacaacgaccgagctttgcgaagccgaataatgctcctagacaaggcaccggtctggttccgtttccgcgttcttcagagaataccttgattcccgatcagaaccttcgcgtacgggcttcatcgcctctgctaggccaggacttccgatcccaggaggccgcgccgccgcttcccaagtcttcgaaaaaggttcaccattccggttcctcgtccacccttttctcctatttcagctcgaaagaatcggccaaatcggccaaatcgcctaaatcgcctaaatcacccaagaaccgtggactccagccgagagtacggcacgaactctccagtgagccccaagtgacatacacgaagcctcaagaatcaccgaaagaatccaagcggaagatgcgtccttcaaaaattgatctttccgtcttgttcccgaagccgcggaatccccaaccccaaacacttctgtccccccaccggatggtcaactcgccctcccctgtctcttcaatggacccggatatttcttcaaacaagattgaaaggatgaccggcggcatgagcaactccaccacgaggagatacgacgcacctccccctcgatcttcaatcaccaagaatgacctacccaaaaatggtcttgatcacttcgatttgccctcgattgcagagagcaaaagtaacgagtggttggagcaaccgcttgagcggacagtaggaacgagtgagattgatatagccctggatagatatgaggggcaacgatcactcttgagtcgctcgagcacgtatactaccagtcaagagcaattacggccagaacagcaacgcccccaggaacctcgcaagagctcaagacgtcctcacagctcctctcgacctaatgagacgtacttgagtcctccctcatgtccagacacaaaccgtggtcgcgtcgcgagtacctcccaggagtcgtggaagactaatgagtcaaaatcaaagagcgagaagagctcgttgaccaagaagggcagcaaaagtactttgaagaacaaagatctgcgaaacaccagtatgctttgcctttcctcttcttcagaggacgaggatgaggaccgaactccaaccaccgacaagcgctatacaaacaagtctagaagagacagtgtggctacttacgacgaatatgagccccagctctacacggcttctactgcccacgcgaccactgccacggcggcgaaacgctttgaccggagactctcgactagcacgcgtggctcccgccaaaccgaaaagagcctgccagtgctcgaagctcgcccacgaaaggcttctcaatcctcgaatggcaagtcttctcagaaatctggacgaaccacgcaaacccgccgttcgagcgaagttcccgctatcccagatgacattctggcgcaattcccacagcagcctctacgtacccccgcagagttgaaagagttgaaccggaggagtcgtgtgatcgccgtgacccgccaagagcaggatctcctcgaggcgatgcgtattcgaaagggcaaggtcacacccagtttgttgaatgcgcacggagcggatagaagatcgctagcctctggcccatcgcgcgattctttctgcggatccgacacctcattcttgcgtctcagccatgtattcccgccattcgatgcaccgtcagaaaagggtgctacccaatacaaagatggaacgccctcccaaagctcgggctcggatagtgaatggaaaccccgcactgcagtttcctcctctagtctcagtgtggactattccgaaagcctgccatctccttccaccagcggtgcttcgccgctgacccccactttgccaattcatcgtttctcgccgcttccctcttccaagcccccaagagggcccccaccggctatccctcaagagcagaagcagcacacccgccgtcgcaccgatagtagcgaggctatcctgctggatagtggtggtgagtcaaaacgcaacaccggccttcctctctggtctttcgactttgattggaaccaggaaagtgccaatctccctcctgtgcactgatcgcttggcccttgataccagacactctcattccatcccttgcatttcctatttcacccttctatctctctctattcctacttgaaatgaccttttacggtcttgcctgcatttccttgacttgcagcacttcgctccaagcttctctttacccaaccacatagacctcttattcctttcctacgtgacccttttgcttatgtcttctcactatttattcttttctttttggattagcgttcactcgcgggcttctgcacctgctatcatgttttacttggatggttttcgtgcctttctcacgatctcatcatttccggctcacgatcataatcattaatatccccaatgatcatcaatttatcaactgaactcatgcaattttcttgcccgattcttcacataattcctgccgcgctctagcttagcctgagtcgggtatcgcggtgtatagcggccatttgggactttgggctttcagttttcgccgctcatatatctctcttctagaatttcaaatactagggtacttggaatgttatatcaacctcctaatgggatcaccgtgtttgttgtaagtttctcatttatatagaagcaagatagttggccgcttatacaagctctttacttggcgagctaggatttgaagaatctgaacatcttgtcttgttcaatgtctttgtagatccctataaatgcccatgataaccaatcttggatatgaaatagacaatatcgacgaatgacgacatgcgaggagaataacaatggctgtgaataatgtctggctagctcgacgtcatcaacaactctcccaaaatccagtactccacacagaacattctaaatgtgatatgagatacccacaaaaggtacacagccggaattgtacacatcacttacctcacgcgacaacttccaaggtcgaacccttggtgagcagtgatccactccttgaccgccgaccttttcgtctataaccccggattattgcttgagcactctatcatcttcctctcctttcttttctaagctcttttccaagttcttcggaaccctcattcatacagtggagtcagccgacgcccattctctccttcgcctcccagccactcgcgtcgcctccgatcgccctcgggaaaccctatccggacctaaaagggaagatctccagaccagcccacccctggttcgcgagttgggatttgcagtttgctctacggaggacatcatcatacacacttttcctgtcgctgcctcaactgagcccatttaccacattcacggattggggaacatactgcgtgccccttttgcggaaacgttagccgctgtttatagggaacacgtacttcgttatgggagatcgcgctcaacgtcagccgtctgggctgcgagctgcggccaatgttgcgccatggattctggtatgagcttgttggggaatacagcttttgcgatcttgggcactgttcgctgacttcgttcccttccagttgactgcggaatccactgcatttgtgctggtaagtcatcctgcgcgtgtagattcttgtgacaggaagatgagaaggctaattgtatttttacactatagctagctcactattctcgagtcatgccacccgccggtggtaaacgctacctgacctctacagcagtcttcctagtcgaagtggtcaagctggccatctccctcacaatggcactctacgacgtctccaaaaccgccccaccctcaatgcccgccacctccctcttcttctccctcacaagcgccgtgttctcgggtgacagctggaaactcgctatccctgccgggctcgacgtcttgtccaactccctgctgtacattgcgctctcgaacctacgagctgcatcgttccaggttacattccagctgaagtttcttaccactgcggtctttggcctgatgctcctgagacggagcatccctccccgcaagtggggcctgcttttgcttctcattgtgggcgtggcgttggtgcagatccctgatgctagcccagagcaaatgttgcaggatgatcatactagccattatttccctcgatccctggaggaatggaaagctgtcaagcaaggtgctggttctggcagcagtttgcaaaagcggtctgcaacatacgagggcattgaggaggacatcctgacggctgacccacacttgaaccccacaattggtctccttgcgaccattggggcgtctttggcttctgggcttgcggggatttatttcgagaaagtcctaaaggacagctcgaaccatatatcgttgtgggtccgcaatgtgcaattagccgtctactccgttttcccggctctcttcattgggattgtcttccgggatggtgaaaagatcgccgaagatggtttcttccagggctacaattgggcggtgtggtctaccatcatcctccaggccttgggtggtatcgtttctgcattctacgtcagccacgcgcagaaggatgcaaggagtttcgccacaactgccaacataattttgagcattgtgggaagcatctggctatttgaatttgaggtcaatgcaagcgtaagttccttgcctctcaaacacttctcttctgtttcagatgcgccctcgacatgaattatgaacaaaactgactgggacattatagttcctcctgggctcggctgcagtcctggtagcaacccactactatgggaacccgaccttcagccctgtgatgggtgccttgcgtccgcctccaatccgcatcgacgcctacgaaaaggaccccgcaggtgacgagggctcccctgtggtgccttccaatgacttctctatcaaacttccaacctcacctttcctctctgacggcatgtcgtcctcccgtcccacctcaccagcaccaggccataccagagtaagctctagccggaatgcaagcgcgaattatttcgatgagaaatgattactgtaactcgctatgcatattgctattggcccacctgacgagatgctctttacgggaaatgatattggatacttgatagatgcgggtggaagtgcggtgttcaagaaagccgcctgtcgcaagcccatttactatgcttggtgccgctcccaatttggagcgtagctactcttcgctgccaaattttgccctcttactgtcaagatgtttgccggttttggctcatgtatgcatatatacgaagcaatgaaagactttgatataccccacgatacttgaaaattgctattcttactgatttgagaagaaactgctgcagcatatgcatatgttacaaaggcatgggttcgcccacgtgctgtcacgttatcgggatgatggaccttggaaccaaggcactttcaaaattcatcaccacaaccccatattcaatcccaatcatcgagaacgcatctcaagatgcggagaaataatcagacatcgaatttcaaacccttccaattgccttcccagaggcgcacaaatgcctcctccccgtccaagaatagtagtataaccaggatcatcaacgagaaactcatccaaggctcccagaagccacaatacagcagcccatctccccgaaagccctccagtggcctgggatcatcagctcatgatgacgacccccaattggatgcttttggtgagtctgccggcttatcatcatggcgggtgctgattgaatccagacctagaactactagcctcagaggatatagagaatcaggattcgggatttggagtttctcaatctacaccgcttcaagcatctcgccatcctgatctacagacatcccatgtctctcgtttctttcagcgtgagttgcttgtatacccgtgctagtgttcctgtcttgttgattcggaattaacaagtaatagcaagctcgagtaccgtttcttctcgctggaatgggcccggttcatcggacactgttttagggcctccctcgagcccgttggcttcgttccaccagaagaagaatgggatacggatgggacagcgcagccttgagacgaatcgtggcccataccgcaatgagactagtcaatcctcaccccagaaaccgatcgcccaggcgggctcagaggctttgactggaaacagacaacgtcaaagcctattcagcaatatcccatcctctgtgcgggggatcgtactcgtatcagtgaatgacctaccggagaactaccgctcgatgttccccttcccacttttcaatgccattcaatccaaatccttccattccgtctacaacagcaatgacaacatcgtcctatccgccccaaccggcagcggcaagacagtggtgatggaattggccatctgcagactcctgaacaccctcaaagacgaacgcttcaaagtagtctaccaagcacctaccaagtccctttgcaacgagcgctttcgagactggcactccaagttctccagcttgaacctcaagtgcgcagaactgaccggagacacggaccacatgcagctgcgcaacgtccagagtagccagattatcatcacgacccccgagaaatgggatagcatgactaggaaatggaaagatcatatgaagttgatgcagctcgtgaagctctttctcattgacgaggtacatattctgaaggagacgcgcggagctacgctcgaggctgtggtttcccggatgaagaatattggatcgaatgtgcggtttgtggctttgagtgcgactgttcctaactccgaggatattgctacctggcttgggaaggatgcgacaaaccagcatgttcctgcccaccgggagcatttcggtgaagagtttcgtcccgtcattttgaagaaggttgtctatggatatgcgtctaactcgaatgactttgcatttgataaagtctgcggttcgaagtatgtgaccttttttgttctgcctttttcctttgaattactcgttggcatactgattggagcttgaaaaggttacccgaagtgatcggaatgcattcatgccagaagcccattctgatattctgttgcacacggaactcagcgcttgcgacggcgaaagaattggctcgccttcacacattgacgaatccacctgccaggctttggaaggaacccaagaagcgcctcgaggctcataatgaggatctcaagagtatggttcagagacttactctaaagaaacacagctaattcgagatagcaacactcgctgctggtgtagcattccatcacgctggtttgggccccgctgatcgccacactgtcgagacaggctttagagacgggcatatcaacgtcatatgctgcacgtctacacttgcagttggaattaacctgccttgccacctcgtcataatcaaaaacactgtctgttggcaagatggaggctgcaaggagtattcggatctggagatgatgcagatgctgggccgcgcgggccgacctcaattcgacgatagtgcaacagcggccatcctcaccaggaaggaacgtgtaagtcactatgagaaactggttcaggggtctgagagtctggagagctgcttgcatttgaatttgattgatcatctcaacgctgagattggcttggggaatatctcggacgtcgaatcggctgtcaaatggctcgctgggacattcttgtttgttaggcttcgtcgaaatccgacgcactacaagctcaaagaaggtgcaaaccaggaagacgaggatgagttgcttcgccagatctgtgagaaggatatcgatcttcttcggaaatgcggtctgattgaagctgagagccttcgatcgacccagtttggcgacgctatggctcggtactatatccagttcgagactatgaaagttctactgtcgctgaggccacaagcgaccttgtccgagactgtgagcctattctttccgcgctgttgaaatgaagtatcttgactgacattagtccagctcaccgtgattgcacaaggcgaagaattccgcgagatccgcctcaaagccggcgagaaaccactctaccgagagatcaaccgtgatcctggcattcgcttccccatcaaagtcgacctagccctcccggcccacaaagtctcactactcattcaatctgagctaggggcaattgagtatcccgataacgagcaattacagaaacacaaattcaccttccagcaagacaaaagtctagtgttcgcgcatgtcaaccgactaatccgttgtctgatcgactgtcaaatcgcccgcggcgactcaatcgcaacccgcaatgccctggaactcgctcggagcttcggagcgaaggtctgggaccactcgcccctacaaatgaaacagatcgagcaagtgggtgttgttacagtccggaagttggctgctgctgggattaccagtatcgaaggtctggattgtgcggagcctcatcagattgagatggttcttagcaagaacccgccgttcggatcgaagttgctctcgagattgaaggagtttccgaaactgagggtttctgtgaagatgcttggaaaggtttgcaacttaatatggcgacaaatgtcattttgctaacctgggatataggaagtgaaatttaaatgtgtcaatgtccgattcaaggttgaagtcgcgttcatgaacgacaaggttccgacgttctttcaacgtcgtccggtttacgtgtgttgcatgatagagaggtctgatggccacataatcgatttcagacgcacaaggtaagatattcatccagttatctcgttataggcaaacgctgatattcttccagtgcgaataagctccaggaaaaactggaaattgaatttaccgctgacttgacgagtccggagcatgtcattatctgcgatgttatgtgtgatgagatcggtaagacctttgaacatgaacaaaaactattcgtgctgacaattatccagcggggacgtggagacaagctgagcttgaacctaacctgccatctcacatttttgctgctatacgggataagaatgccaaggcccaaattactgaaacctcgtgtcatctcaaggggaatttgaatcctaaagacgcagagaaaccaaagaccaacacgactcgtccccacggacgagatataaccagtgtcaagacaaagtcgcggtgggatgtggacgattttgatggcgatgacctccagctcgatgatttcctcgttgtggatgaacgccgtggcaaagctaaggaatctacaaagccacatcctgaacagtttgatgatatagattggttctcaatggattcaaccccaccgagcacagctaagagaataccgaaggtctcaaatccccgagaagaagactgggcggttgatatggacgagccagaggctgagtacgagccagtcagacttgcgaatggcaaatgggcttgcaaccacaaatgcaaagacaaaacaaggtttgagaatctttactttctttattgtcaagctaataacttcagctgcaaacatttctgttgccgcgagggtctggaaaagcccccgaaacccccgaaggtaccgaagcgggccgtccccgtggccccaaaagaagctggtctcaatcaaatgactatctctgcaagtatcacaaaggcaaccccaaccagtaactcgatttcgagaaacaaagtggccaaacaacgcgtcacggggtttaagaatgacgaccgtgtttcaaagcctaagaaaatgccgatgtcgcaggctgcaaagaagaatccaagtcgagagaagtctgtcctttcggagagggacaagaatccttcatataagagggattgggaaatgagtccaatgaatctcctctcgagtgactatggtgacgataacttcgacgatttaccgtctccatcacgacttctcgtaaatagcggaccagggcttagaacatcagtttctccggtggtgaatggccaggcaaagaaaaacatcacagatgttgcaatcattgaaacgaagcatatagacctcgagcctttgctctacgcttcacggtccgccgtcccgcaaaaagaccaaaccaagccatcaacccccaaacaacacgagataatcgagattctagacgacacacctccagactcaacaaaattgccaatgacgacaaaaaagaaggagtcttctgtcaagctgaacacgcttccactttcaacaaaagcagaccaagcccccgatctaaaacggaaggcgagtcaagtcgaagctcgaacagaagaccacaaaaaacgagtgaagcaaagtcccttcgtttcggctttgcagttccacacttcaaactacctgaacgatatacaaccactgaaccccgagcatcctgcgtctcctgtttctcctgtctctcctgtttctcccggtgctgctgtttctcctatgatcggcggtgggatagatttgactgcatcatttgacgacggaacagatctgcttgacgagttcaaggatattatcaaatttatctaaatgattgggaaatgctggccaagtggcggaactttttgttttccccttacgcatctctaggatttattttgcgtgctggtatgtatggtgctgggttactgaactggtgcaagttgcggctttacttttatatacactactgtgctatgctacattgacatttataattctcggcatgaaattatcctgagagaatttcgttgcattgatattctctaattttttgcaccctgaaggacggtgtagagctgtgattatagcataccaaccacaataaattaaagtttaattatctctttctgcacacatttcttgaatagtaagtacagtagttatcgtaaaaagtgtagtgtcgatctagacatccgtaacataacagcatatacatatcctagtagacattaacagtccggttgccaatatagagacgaccgggatttagggcattgtttcgcccatggtaagactgtgaatggacggaccaaagctcgcaatacatgggacttcaaactgtcccttcgttcttggcattatgaacttcgggtttgtcctcggggtagtccgtgtctgtccaggtctcccagaaacaggcacccttcttgagcgaagtgatagtctcccaaattagagtaaacacaaacaaggccatgatgattgacaacacgtcagttgcattcaggtggtcagccaggggcaaaaggatcgtgatgataccgactgcagggcgcatgatgagtcggaaaggctaggacaaacattagtgactggcgtggtgggatgcaagtaatagacggagggggcgttgacttaccttgtccaagatcaaagtccccgattcatcattggacttgtgcagcagagcaaacacgtacaaaaagatcatgcctgcacccagaccgccacaaaggagccagcgctgtggagcttcgaactctttctcggcaactgactgtgccgcaacatgtccgccagctagcagactggcaataagtggtagatgaatcagggcccaggaaaaagctgtataaaccgagtgccgcaggggtgagtggtatttaatgagccatcggcgtgggcatacagccaattcaaacagaacgcaataaccaatgtccaaacagctcgcagaaggcgtttattgagtccaactgcagcataggagccaacaataatcaaatagagaaactcgcccagcgcaatgatgtagaatgcagagaaccgatcaatttcgtgagcgatatccactgccgtcgaccacctgacgcgaaggagtttcttaccagccggcgagtagcacagaatccaaaccatggtctcaaccgagatagcgacagcagcagccgcgatcttgccgcggatcgagactgactcgaagtatagtgggatgtaaatgcatagtgacagactggaaaggacaacccagaggcgctgctgcggacggtggtggtagctggcgaaggagtagaatacgtgggcgaggttgcatgagattcgcgcgaccatgtaggatcccacggcggagcgcatggcaccgatctcctcgtcgacgagtggggcgttgttgccgtatacgaccagtacggccatgacccacagaatcaggatgcgctgtaggagatcgtcggtgtagaaggcgttcatcaactcgcgcagatcgctccaaacgttccatgatggcgccaggatcagctgtgagcgtgttagcttatctatcgcgtctgaaagtggatgggatagtggaggcgatggtggacccgatagtagaagggcggccaactcacaatatatttgaccagtttggcacctgagatgtcttcagcgagggtatcggcgaagttcgacaggatcgcgacatagagcagatcgaggaatagctcgaatcgcccggcttgtcgctcaccatcctgacggcgcatcaacttcccatcctcgaaccattgtagggcgcgtggttggtggaataagaaacgaggatttgactggggctcctcaggcgttgaggccgacatgactgtgcgatgtaaaagagatcgagcctagcaaggggattgaaaagcttaaaacgggccaatctcttggccccacagttcgtccccgcaaatcagattgcacaatttcggatatattatgtcatcaattttatacccagatcacatgaccggggaaaccatattatcatttgtcagcatatgttcggcgaacctgcttttccaaggctgttctattgttaccccgttagtttctagtaaattgcacatacttggacaattaacatcctctcaagagcttgtgctctctgtgcaaaatccgaatcatgaattcggcgaaagtttagcgaagtcgagcaatgcgaaccggcaatttgcaattccgtatctgagtactagtttgatctccttctagaacatgtggggctcggcggtatagagcattaacacccagccttttcataccattcaggcgggtaatctggcataggatgagcgggtatggggagaaaatccgtcgaatgtctcgataatctttggggtgattttgacgttttgtttcggctgaaagcaggtgagcattaaccgaggaatacctggagctccctgagacttacaagggatacttttggatgttcctccacgcacacagaatagcctctttctgcgccatttcatgatctgataaaggatccacagactccaagagaagggaattgaagcttccatcttttccatcaaatatccactgcatgcagaactcaaacaatcttgggtagaagcccgcagatgcccaatcaataaggcacaaggagccatcttcctgccatatgatgtttcgaggtacaatatccagatgacagagcacgagatcacagccctgtaaatctaagttcgggttatgcgcaaaaagccggctattgaaccactcctctatccggctaagactgtcgaaaaccaggtcttctgtttgagggaatagaaggccacgacaagcgcctctataaagtgatccagggatattatacctcaatgttgcgaaatgccccagcatgctggcaaccctctgtatagcgctaacgtcctctaaaggatcgatgacctttccttctataaattccatcacaatataaccccagtcttgctcgtcagcaaaaaaaatcataaacacgtgggatacgagctatgcggctgtccacaagctcataagctatcctttgattttcaaattcttctcttatcacatctgggccgcatttaacgacttgatgatcagagattctgataattcgtttgctgtattggctaacaacgttgccaggcaacgggtttgcgcaagaagcgatcactgaggctcgttgcgagtcttcgggacgcgacattcttttagaatggaagactaattgggagtaaaatatcataggacaacccaggtctggggattcaaattagttataaagatgataagagaatgtcttgtcttgttggaaataagaaatataacttggcgcggagcggggtaaaaaggggccgaagaatgttatggtagcccccgtttgtgaaaatctggaaagcgcgagtaaggagcggtgtaaagtagagatgcaactcgccgctaagtttgcttgttaatatggcgcctgggagcattgctaaaactatcattaggtacacagctaagagttcagggtccgtcaacggtagtgagaatgtgaggacagtcgttcagaaaatttcctagaggaccaattaacggctttcgcctatcaaatggaattttcgttcttaaaggattctttttgtttcattgcggtagtgaaatgtatgcctaggtgtatatacgtacatgcatgaatctcctactgtggcacgtgctacaccacgtgcagtacccggtattcggcccgccccggagagccgcaccgccttgcgggtactgcctctaggtacccaccgccctcaggggggtataagaaggtggccctgcccccggaacttccttttcttttctttcttcttcagctctctttgcctctggcttagatcaagtgtagtatctgttctattcagtttaatcgctgaatgttctgcattgcagaacgtcatgattatactaatttttggacctcgcgacttggcctctgtgcttgcatacgcctcgttgcactgtgtcactgggcttacactaccctcggtcgatgcgaaccctcttttttttcattaatcattcggcttgtccgggtgtttgaagaagaaagctgtagaagttccatcatgaaaccccgtatgcctctcgtatcaacgcgcccatcatcgactaacagatgcctttctctcacaatatgccagctagctgtgtcatatacctgtgcaagtccttacttgcaaacgaaccgtttcccattctctcctttgacgcactccataccgtgagcaacccgcttctcgacacggtcggcctctccatcgacgaattccacaccatcattaatttaatctcgacacagtcggtaccctccttcaacacatatcccactacacttccctgaactatcacccccacaatctgctactcgcgcagtcaactcccttcatacatcgcacaatgtcttcttcttctagcagctttgccaaactaaagctcctagaaatcattcgtcttagcccctactagcgaaaacaccttctctttgtggtcggccacatactcgtgtacactttcaacactcgtgaccctcaccctttcgagctccttgccagcaaacacaacttccgaaaacctgacagcttccgagtgaacatgtatctctcagcacctgtcgtgcactcgcggtacaatccatgcatctcataaaccttacaccaagatctcgcctgacgctaacgtcgcttcccagagtctttacaagagccttcatacttacagtcccggtctcgagaagtttcatagctcccacccacctcccctccacttggaagaccaatattaaaaagaagctaggtcttgtactacgccctataccgtcgggaccaccgccagtgcaaacagcctgcctatattcaattagaatttttgccatagactggctgggataagcaggccatcatggattaccaggaaatgtccgctggtcgtcattatcttgactccactaagtttcctatatcttatacctagaatcacatatatcatttcctttaattcaatagttctaataccagagatcttgcactgcattttctagcagacattatatctttacatctgtagatatataatgtcattgtcaccggcgacttcatttgccctaatagccaaagttaaataacaataaaggtctacaatttatgcggtacaatgtcagactccaactgctttgtgtttttgatgtcagattctgtgtctattacccagcgtaaatcaactcatgttacatcatggcaccttgacgtctctcagatctcccctaccacaagatctttccagatgacccacaatatacattattgccttgaagctatattctacaaacactgcgatgtatgtctaagcataatcctattctcaaattcttagtaagatagacgagaggacaactagtattgtaacacacacatgcttttctttctctgtacattcaacaaaggatttgtatatcgtggagccgaatcatccaatagatgcgggttcactgggaagatagcccagagccgatgtcgataacattatgtgagaatcgtgttgattaatggaatatacatcgactgggactgggaggttcgacacgctcctgcctaattgcggtgttgttctaccttagacattaggcataaactttttgtcggagtcaaccgtatgtgtaataatgggggtccaatcaatggtgtaaaatcgtctgaattgtcaagttcgtcccccgcgcggtgcgttggctgacgagagatgagaggcattgtttcgggcgagaggtgatgtttttggttggggctcccgatgctatttatcgtcgccatgaccttacagtagaattcgaaaacagactactccgtaccccttggacacacgctttctttcccggcgccccgctctgactgcactgaacctaatccagtaggagttggtctccaccaccttttgtccatgtatttctggtagatcgtcaaaattacggtgattacactttccggcattggacagacccgccttgccggctaaatgactcgagtaagctaagcggtcatgtggttttgcagcccagcaataaatcgtcccgccctagtgtgacgtcgactcaatttccctaacctatacctctctatgtagcatacgaagcgtattaataaaaccatactattttcgtgcggcagttattcgttatatctgccccgcctaacactctaaaggagcctacttgtataatacgcttgtcgggattgtcttaagctgtgactaagggcaaaatttggggataaaatagtaaagaaggaaaaagccaagtagggattcgatgtaagggtatatcggttgcctaatcttaattagaaatggtggtggtggttaaaatagtaatagaagttgtattgaaaacgagttgcgttgacggccggctgacctacccctgactaactaactaacgttaactatgtgataaagacgaggaaaggtatggtcacagtctggatcgtaagtggcttgaacagatattgtgagtaaaaacggagtcacgttcaacacggtgttgttgtttgtacggtggtcaatagctctaattttcttcggaatagattggaggaaagtggcgactagaacttcagctgaactgcggatatcttggaagagcaggaatgatgtgcggtttatatctacgtcatgcactgcagaactcagcgggttcgcttagggttagagcgatcaccatctcctcgggagggccgaacgccgcgaggaagaagaaactgtgggtcgtccgtccaatgaaatcatgatcggcatacaccttgccccttctagatgccaatttaggttgagttcttgccaagatcgtcaatactactgatcagatcttccgcccgtgtacagtagcactgcgcacattgcttcatacttcggagttattcgaaatcaaatttatcgatatctcggcaagttgcaaatttcactgatgacgtagagaaggacgatcagaccattttcatggctcagctgaaaatctaagctgagaacggaagctgagccgcccagatctgtctataaattaagctttatacccctctctcccactccagcatctaccatccttatcataaggtcgaaaaccacaagactcaatctaattcaatccaagccccaagcctaatcctctcaaaatgccagtccaaattgtgcaagagtacgcctgcttttcacctcaactccctgcttatacgactaaccctcatttcttcttttagccccgaggaagttttcgaagctattacggagagcctaaagccagttgttgtgcattactgggctccttggatggggggagagtcgccatttatgcctgttttcttgggggcggatgaaaatcgtgggggggaagagattgattttgtcattgtggatagtggatttattcatcccgcgcatagtccagatgagatgcccttaacggttctctatcatggcggtgaagaggtagattctgctccgtttgatcccgaagcagttgaagcactcattgagggagtataaagagctggaaattgggataatattatgctaggtaatatcattggtatattgatttatgacagcttatggctggagtggtgatttgacgcttagttaacaatactattaaggtgtgaagaggaaagatggtaagatatgatatgattggcacaataaactgtaagatagtatatacgtgaataagatagaaataaagaatgaaagtagatacgaaccactacttttgtgattcctttgactatcattctagaataatagtcttaaactctggggaagcctctaacccattatttgaaaagatctcttatttgatattgactcgtttttcaaaataatcccggttcttcgaaggtatgttagctttgctggaaaccccatcttaagtaaagctggtaatgaatgagacgcgcgtaagatagcgagattcacggagatactaaaaacatgcgtccctaccaggtctagctgtctacaccgtaagcacagtcttctaattataactactatagctgtggcaaacattgagtgcgggatggatggatcgatgattttattcactttgatctcgcgaacgggtgccatggtgcatactgtattgtatgaccacgggcgattcggcaaaggtggtttgtccaatgccggaaagtgtaattaccgtaattttgacgatctaccagaaatacatcgacaaaaggtggtggagaccaactcctacaggcattatccggtatatatgcgaatacgaatataagcgggagcgggcgggagcacgtgcctatagccgacacgtgctcctaggtaaaaattacgtcccgatccgcagagccgcactgtaccgcctttaagggtattgcccccgaatacccaccgcccttgggggtatatagcgaggccttcgggcacgagccctcttcctcttttctttcttcctcagctctctttgcctctggcttagatcatgtgtagtatctgttcttaccagtttaatcgctggtagttctgcattgcagaatgtcatgattattccaatatttggacctcgcgacttggcctctgtgcttgcatacgcctcgttgcacagtgtccctgggcttacactacccctggtcgacgcgaaccctctttttttcatcaactactcggcttgtccgggtatttggagaagaaatccatcgtccaataccccttctgatcttgttgtggagttcctttatgtgtcttgcccctctgcctctgggtcctctctaggcgttgcagactggataatacgagctctacgatggtctgtctactgattctctagactttctgatcttgatttccatgtctcttcgcttggcctcattctagtacccgtgggtcttcgcagggacccaccttggcgatagggaataattccctgcccggtcgcaatcgtcgcccgtaagagatttcacgtgccagtccaaccccgggtcatcatcgtcgcttccatggtccatttccttctttgattcctcgaaagttcttttgattcttcgtgtgttcttcgtgtcaaatatggcccgagccaagcgccaaaacactcagcctttggaggattcctctgtggcccccgaaaccttcaccgacggcctacccctcccgaagttgatcgccttcgacctagactacacactgtggccgttctgggtagacacacatgtcagcgcccctgtgaaggcccgcgaccacaactcgcgcgccgtcgaccggtacgacaaatcccccgattgacattatcttttgaaactactcagatctctaaccccgcattccttgtctcaaacagatggggagagtccttcgccttctatccggcggtgtcgtcaatagtctacgcatgcaaacatcgctcgattccactagcccttgcatcccgaacccaggcccccgatctggcgcgcgacatgctcaaatccttgcatatcatccccactttctccgataaccccgccgcgaacgctaagaccattcgcgccctcgattactttgattttatccagatctaccccgggaataagacatcgcatttctcgagaatccaacagacaagcagtgttgcttatgaggatatgctgttcttcgatgatgaggcacggaaccggaacgtcgagacggagttgggtgtcacattttgcttggtgcgcgatggggtgaccagggaggaggtcgaccggggtgtgagagcttggagaaagcgtaatggtatcaagcgagataccatggaggaatcatgaggatccttgatcgtcttatccgatgattcctacattgggggatgttgcgctgtacacttggtttgagattttagataccccgacttggaatttatgagaaattcggctttttatgcttcacagcaatccttcagtaccgatttgaatagagtaacattcaaagtacatcgtatacttcgacctatccatggatggagccatgcgtccagacattttgttgagctgactaagatattcacccccaaaggcggcgcgatgcagctccaaaacaggaacaccgtgctgtcataactagatctcctcgaaacacacctcctccaacacaaaccaccaacatggcgaccctcagacctccaacaaacacccaccgctcctcatcctcccacagctccggtccaccaaaagcccccctaaaagccgacccaacagcgacaatcgccgacacggtcatcttccaagggcgatacctcgtcactatcggcgcagggacagtcatccacccgcgcgcgaaattctactcatacgacggcccaatcgtcgtcgaggacggctgtataatctgcgagaaagcggtaatcggcgctccgccaagctcatctcgctcaccgtcaccgtccagaccagcaagcacaacacccaccgagtctagggtgtcgacgcctgagcctaagaaagagacatcgacgcggatatcatactttgttactgtcggcccgttggcgacggtcgaacccggtgctcatatccattcttctgctacaatcgaggctctggcggtgattcgccggggtgcggatatcggtgcgcactcgaaggtgtgttctgggtgtgaaattgccgctgggggatcagttgctgagtgggtggttgtatatgggcagggcccgggaatgcggaggaagagagctcgtggtgtgaagggggtgagtccggctgttgttgctgcggcgcaggttgcacagacgcctcttcctggtcctgcgccggcgggcaaggttattgaggatgcgaggttgatggttttgcagaaggagagggagatacttgggagaatgcttgttcctgctgctgggaggaagaagtgatttcaaggtgcctcgtcgatatttttttttgttttgaacttgcgttcttctgtatcggaccagatttcttggattcgtgtcttctagcagcttataccccagtttgtgtttacagtggttagtatatcggaggtcgttacaaggatggtgcacgaaatacctcgcaattgaactatatcaattgagagtaggaatataaacccgtaggaacgccacacattcagtagataaatacaggacaacaaaaaaaaaaaaaaaaaacaaaatagctttctgcatagcagattataacatgaaaaacaatacaccatgcggaataagcagacatagaaacccattcatcgacaggttcccgtcgcatttgaatgaaattgagaatacatcaatgagatagaaaaagatggacaatgaatgctgcctaagacgaggctccaccacgagcctgagggccaccgccgcctctctgtctttttccaccacttccaccatcggtggtagtgtcggggccatcatcacgagagcgcttgttgcccgccggaatgaactgacgagctgaagcactcagattcccacggttagcagtggggctttgagcctgagcgacgttattttgattctggttaccaccgcgaccttgtccgccacgaccgccacgaccgcgctggaggccctggccgcgctggttttggccctgaccaccttgctgctgctgttggtcatgttgttgatggccgaattgctggttaccacctcgaccacctcgtccacctcgtgcaatcggaagtccagactgaagagcgcgcatcagaccaggcgggtttccggcgggaggtttgctgggaagagaagaggcatgctgattttgatcgggttgctgaacttggccgaacggattggctggcgttgcgggctgtgtcccaccttgctgggggacagcaggtccagaagacgcagttggaggcgcggcttgctccggggctcctaccacagggactgaggcaggaacggaggcaggggccggggccgaaaccgggacttgtggcgctgctagtgttggagcaggaccagcgggttggactggtacaggtggcttagcagccggaactgcaattggtgcaggccgagcagtctttgcaatttcccaaacttccacaacaggcttttgtggggtctctgtggcagcttttgataccacatcaatcttggcattcgcagttcggaacctggtgtcaagcatgctgagacgggcggctgttttcttttcgacaagttcgactgccgagttgaccttctccttgagttcattctcatgggccttgatcaatgcctccttttcctcggtcgacttctgctgtagtccagccaatgcggcttcattagcaccggaggaggcttgagcttcttgttggagtttttgttgttcgcgtgccacttgaccgcggatgttgtttcggacgattgtgcgaatagtctcatgcttcgcgaccagctctcttgcttgagcatctgtcaactcaggaatagtaaacccggcaagctcaaacgtctttgacggcgttgcaggggttgcatccggggccgcacctggtgttccaggtatggattgttcaccggcggacagtttctcaatttcttgacgatgagcagccttaacttcgttcagcttagagttgtacatatccttaaggcggtcagcgcgttccttgaccttcgcatcttgttcactagcctgtgtcgctagaagtccatccttctcggcaagagctgcctcgagtcgctgtatcttctgctccagggcttgtatcctttgaatgtcactaggaccagggatttgaactgtcgcggttgggaattgtgaagctggggtagcgttgacgggagcttcttgttcggcagctggagcaggagcaggagcaggagtaggaataggagtaggtgacacattggctggcgcctctgccaccttggttttcaacgcctccaattcgttctttgtagtctgaagttccaattggatgacctctttctcctgcaacgccacattgagctcatcctgcttggccttgacacgcgcgctaaggtccttagagcgtgccttgaattgctctgtgagcttggatcgcaagtcttgcgcacgttcatcagaatgctgcttgagctgctctgggaactgggcgatttgagcctgaagtgactccatctgggtttggagagcttcccgctcggacacggcctcgttcttctccttctcgagactcgagagcttctccttcaactcttgcatctcagtaggatcgacgcggtcgtacttttgaaggatattttgaatacgttgttggtatcggtcacgatcggcctgtagaagctgcatttctccatccttggcttcactctggctctccaactcgtggatcctggtcttgaggggttcgatctcctggaccagttcattctcgcgggcgatcttttgatcacgtacggcctcggtttgtttcagttggtttctgagagtggcgttgctttcacggaaaacgttgagctcattgatagtatccaacagcttactgtgattcaacgcgttgtgatcgctgtcggccgcagcacggcgctgctgctcaagcttcaaccgggtctcatcaagctgcgactgagtgtagtcgagctgctggttgaggcgcttgctttcctgggtcgacaggtggtattgaacctcgacaatttctttctcgcgacgcaagaacttgataacctcctggaggccctcgaggttgggggcggcctggtctccctctgcctcatcgtctgaaacattcattcggtcccgctgtaaggacgaaatctggctggtgatgttttcaagctgcgtgtgaagcacagaattctggtgaagaacctcctcccgacgcttctgcaattcagaaagctcaccctcgtacgtggctcgctgttccgcccagctttcctccttctgagacagatctgttttgtagccctcagattgggttcgcagctcagcaatgtcgagcctgagctggttgctctctgcacgaacaacttgtagattcttcgctgcctcggcgtgcttaacaagctcggtctcatagttttgttgggcatgcttggcgatttcggcctgcgcattaaggtcctcctgatggtattgcgcagcagtgacatgtcgttcattgtcggccttgagacgagtaatttccgactcgaagttggccttctgctcttccaggcggcgggttgcctccgcttgctcttcgcggagcttggtcatttcagtgttagaggtggacagttcagctgagatttcctcaatgcgagtttcgaggtcctgaatcttagtattcttctcctccacgagtcgatcagtctcttcgcggtattgttcctgggtctcggtggcagactctagacgttcttcactggcttggctgatggcctggtagtcttcggccagttgcttggcgtgttctagctcgcccttggccaattctaggtcccgtttcagttcggagacttcgattgaaagttcctgctcgcgagaaaggccacttccttcaccagactcctgatcctcggtaggaccctcggtggtgccggcagacacgcttggtcgcgaattcacgacctgcagacgctcttcggcgctcttgagctcgactgcaagctcatccacgcgggattgtaagtgatcccgggtagtcttcgcagcaaccagctcttcgcggactgcacccaagctggtgaccaaatcgtcaattcgtttttgtgatgtctcctgctcgtactcccggcgcatgctggccttcttagattcctcaacttcatcattgagcttgcgctttgtcgattgcagttcgctttcgagggactcgacgttggcttggagtcgacgtcggctctcggagtcgctatgttcacgctcgttgagaatggtttgcaggtttgcgttcaatgagtctagacgaccgcgctcgttacgcaaattttcggtatcatcgatgagcctcttctcgatattcttccaaagggccttctcggccttcagattggcattttctctctgaaggctctcaacaagacccttagcttccacaaggtcttcagcagcttgctgggtgcggagatcctgtcggtttgcattttcgaagagagaagaataccgcttctggatttcaacgttctcattcttgagcatagtgaagttactctgcaaaagctccgcacgttgggaagcagcagcaagttggctgtttgaccgactgatgtcagacataagctcactgttcttacgtgacagctcattgacctgttgccgcagtgctttgtggtctgttgtcgtttcttcacggaaagtgtcgaaatgggcttgaacttttcggagcaactcagcgtagtcgggtcctgaagtgtccatggctccttggggagcagtaccaagaggcatggattgtgagaagacagacgggtcgtcgatggttggctttctgtgcatgagcatactgcggaatgtgtcacgctccttgacgtaactttgcatctgtgcgctgagattcgcaatctcatcacggtttgtctgcgcacggatccgtaactccttcaactcgtcgagttctgcacgtcgcgtagcttccttcgcttgtgcctcttcaccctcctgcttatcaccaagttctctcaacatacggcggagagtgtggttttgatcttgtagttcgtgaagatctttgaaagttgtgaggtgcttgctgataaagcgaccagtttcattgagatccttcgctgactcctcgacttcaccccgagcaattttctcaagctcctcgcggtcgtattcttcgccatgttttgcgacagcaacttctaggacaagaaccttgacttccgcactcagatcgcgaagttgctggcgaaggatatccccctcgcgagctaggccctcgacttgcccttgccatttcctggcttccttgagggcggtatcccgttccttcccggccgcttcgaggagagtagacatttccacaacagcatggtcgagacgcatttgttctgctcgtccctcctcaatttcgggtctggttgaatcaagttcaagaaccatctcgtcaacggtattccggagctcctggcaggttctctgctcagctgcaagagcggtgcgcattctgtcgtactcggagtacatctgtgtgacattcataccacccttaccacgagatgtccgaggggagaacgagccagtgggagtgccagcacgcatgatgcttgatcgtagaggtgtactaggtgcacctccattaagagagacagcggggcttgctgaccttcctctggcaggttcaaactcaagctgggcaacaagtgcctcgagttcggcaattcggcgctcagcagctcccttgtcgttggactccgtctcaagctccacacggaggcgtgagatttcctgtgctgcgtcatcctttgtcttttcgagagctagttgacattcttgcacccgttgcttggccgtctgggcagcagatccttgtagctcggccaatcggttggagctgtcaagttcaatgcggaaggattcagttgcctggatggcttcctctttcaactgatgaatgctggccagagaagtttcgtatcgctgctctgtttcgtccaagcgactcttgagcgaattctcacttcttcgaagagagtcaattgtcgagtttgcttcttcattttcacgctgaagctccgagatccgagctcccttttctttgcggaacttgatgtattcggcggattttgttttcagttcggtctcgaaccattcgttgttctttttagtgagatccagttcttgttgaaggctctgttcgcggaaacgcgcgctggcagatgcggcattggcactctggagactttgctccgcggtggagagttcacgtcgtaattcgatggtcttcttgtgctgaagcgaaagctcctctgccaatttatcataggccgcagatttcgattcgagcaagcccaatgtgtctctgttggacgcctccaaagatgatatacgcgctttcaaagatgtagtttcggattcgttagacgtggacgaggatttcagtgtagaaatttctgtctctagtgaggaacgcgtagtttctattcaatgttagagaaaagctcgtcagtactgaaaaatatagagatatgtaccagcttcatgcagctttttcctcagatctgcgacctccgcgtgtcccttctccacgctagctttcagaaccttgaccttcgactcattgctgcgcacagaattttcaagctctacctccaagcgaagcttgtcggacttgagctcgtcggattcatgggcctttttattgattgattctaaaagttgattgacaagctccacagttggggcctgccttagggtcgtgagagtcgattcgggaagcgcatagtgggatgataggtagggtagttgaatggcagtttcagccatgttgtcaaacgaggaacagcactgagctgtcgtggcgaagaaatcaagaaaagcaagtatgagcggccctcgaggactggcgcgccgtgtactgttcagagacaactacacacagcgctgggcgagagacctcaggtcatgacgatgtggacaaactagatgtgtgtcttccgagggagaaaacgaaggattgaatgatatagtaattggaagaaatggtggtgagatgacttcaagggcttccgagatccatttccgcgccttggggtgctgagctcttgcacgtgacattctttgtctcgccttcaatcttttaatagccactctcatcgaagcttcactacttgtctaggctgtcctcattctctacgcagctctttttgggtgtattctcttcttttctttcggataatacttaccaccggtacctttgccaagccctgtttgaatcctccagctcgatctggtcaaaccgagtggctaccacctcagctctgtcccattctccccttgaatttcagcgatctccaatccttcgtcgcaaccatgtcgtaccttcagaatcagctcaaaagcttcaacgccagtgtcgtggaatcggcaaaccgcatgcctacgcagcggcgtgtggtcagtaaccaaccgatctctggcagcagttctcaggtcccatcgtccacaccgaccccttcatccactaccgaggtcaaaaagaagcgtcatgacccggacatcgtctactctcaaccggccaatacaggcacgggcaaagatatcatgacgcaggtgctgtttgcgatcgagcacatgaagaacaagaacattccgctcaggttctcggatatcatttcatacctctcactccagcatcgtgctcatgaccagggctacgtgcaggctcttcggagcattttgcagatgcatgagaaggttgagtttgacccgagcggcgcgaacggcgagggcacattcaggttccgcccacctcacaacatccgcaactcggagcaacttctgaaattcctccaagcccagactactgcggcgggtatgagtgttcgcgaacttagggagggctggcctaccgtcgaagaagagatcaaccaaatggagaaggagggaaaactactcgtgactcgaaacaagaaggatgagcatcccaagatggtgtggcctaatgacccgtctctaattgaacacttcgacgatgagttcaagcagatttgggacaagatcaaagtcccagatgtgaatgtagtgaaggaagagttggacaagttcggcatcacacccaccaacaagaacaaggtgctcggtccccgggtgattgcgccgtctaagaagtccaagaagccacgtcgaagtggcaagaccaccaacactcatatgacgagcattctgagggactactcgcatcttaaacggtaagtcagcaagggtctcactttactgttgtcacatcagaagttgccttgatattatcgtgctttgcattgctttggcgtttgggagaaatgcatgcggcctcattctcaccgcatagaaactggtttattactttgacatttgcttcgacagcattgacatttgtacactacacacgtagaaaatgatagatacccaaataaaaaaattaattgattccttacaaccctagctacctcagattccaaagtttcttcatgtacccagttagtccaccatctctctaccctcatgctctcacccgaagacacaagtctataacccgaatatatgcatcaattcatccaaaaaatgtatccaagagaaggcgtagtgatgtacaaggtaccccaaagcacacgacccaacaaaagcgatctgaatataacaacccgaagatcaaatgcaagcccccaatcattgcttcccattcgcagcggcaccagtaccgtcacgacgatccaagtacaccaccaaatcctcaatagtacacaccttaatcccccacttctttccaaatcgcaagcatccatcccgacgcatcatgccattattccccccaatctccgcgacgccctcgacagtctccccgtcctcaacaagctcggcaataacaccagccggcgccttaccagcaagcttgcagaactccaccgcggcctcggtgtgacccgtgcgctcgcgcacgccgcccggacgcgcctgcagcgggatgatatggcctggccggcggaaggagtcgacctgtgccgtgggcgaggcgagcgtgcggcacgtcagtgcgcggtccccggcggagattcctgtcgtcacggattcgtcgctcgagtcgatcgtgactgtgtacgcggtgcacttcgggtcggcgttctcggttaccatttgtgggagcgcgaggcgggtggcgaggtccggggtgatcggggcgcatattaaaccgctgtgttttagaattgtcagcaaggtttttggggtggcttcaagtttgcgcgtttgtctttgagggtgcgctattgcggggagggaagacgggtttcgtcgctgtcttgatcgggtgggtttcgtacctcgaatagcgcaccaggaaggccatctgggcggctgtgatggactcggcggcaacaattaggtcgccctcgttttcacgatcttgcgaatcgagcacaatgatgaattcgccattctctagtgtagggctccgttagtcgtttggtcgttatttggtctagtcggaaggcgccacgagtactgcatgctcgttgtgcatgctcgttgtggtgaaatcggtttctctgtaaagagttcacttactaaatgctgcaattgagtcctcaatcgagtcgaattggtgtgcgatttctgttggtgaaggcattttgatttatttttgcccctcactgcggaatttcaaggatgggtagtttgagatgcacggggttgcaggcaatatgaataagaagaggtcgaacaattgatcaagaaaagtaatattcggattggcctagaatcaagaaagaagaagaagactgaagactgagtcactggctgacaagaacattagaaatgcccgtgatgtcggcgcgggggagccgaaacgcggaccgggcgattgctaagcctcggagctccgaggtctatgaatgtcgttaaatccgagtttcttcccaaattgtagcatattccatagattactgcccagatattggcatatactcgtgtttccgacacatcagcccactagaactgggtatccggatgcagcgggtgtagagaaactacaagccaaaactttgactccccatccagcggacctcatccgcctgcctctcaagcgcacggcgcatataatccccataccgctgctctttctcccaatcatcacgccgtctatgtcgcatctgttcacgtgtagcttcatcgacctccgcatgcataaatacatcatcatcctcgtcaactgctttatcatctgtctccatctcataatccgccggaatagaaaatctgagacgaccaatgcgctctccagtccagataaggagctcatcaccagtaagatccccaccagtaggaagaatcttgcgagctacctcgttattccccgtcgattgggagtgccagagcccacgcggctgctggtcttcttctgtctgtggagttggctgttggctgccctgaccgaatggtatataaggctttgagttattgatattccagcgccggacttctgaacgaccgtctcgctctgtccacttgatgttgccctcggcgtcggaaaagacgatccgattcccatgcgaccccacggaaagtagtttggaactcgcggcgctttggcggttcttgtattctgggttgagggtggatgtcatgttcgaggggctgtggtctttttcgggtgctgatttgagattatagagttccagcgagcctcgtccgttatagtctccgcatgctacgacagaatgtgactcagggtagatggaattcgagaagaccgggaatcgaggcgctggtaccgaggcaagactacatagtcggccgccggaatggactgtggtctgtagctgagggaagtagcggcggtcataacataggatgctggggaagcgccctgcaaggagaattgtattcacatgaggagctggcggatgcaggatagaaagagggccaggttggaagaggggcgcgtagttggctcctttatctaagggttctggactgcgtatgcgagtaggtgactgtccgttggattgcagttggcgtaagggcgaatcagagtgggcaaagatgcctagtcgggaagcgtatggcccggctacctgctcgcatcgcaagctgattgcctcttcctcctcgacggctgacagtctggagtcatagatctgcaggctgagtgtagtggctagtgtcaatggcactgagtaatccgtctcctgagaaagggcaaagatcgaccagggatagcgctgctgcgaaatcacttttaatgtttccaagtcaacttcattgaggacattcccaactgccagatacgctctttgtcgcagagaatccacgctcactccctcgcctagatttataaattccagcgaagtcttggagggggaatgatctcgacgaccagacaggctggccatgagaattccgggctcactgatcccaaggatcttgcctttacttgctcgagagtcagctgagtgtgaattattcaggtcccagatgcagacgctgccatcttcaagcggggcaatgatcttgttctgactggctgaactccagtctttgagtagtcccatgcctttggcctcataggactggcctcgtttcccttcacttttgcggaccgagggctgctcaacccaggataaacatatgggcccgtgacgagcaatgtattccgaataccagtccacatgctccccctcggttgatgagtcccattccgctgccgccctcgccctttcaaaccaagaccattcctcatcagagtctccgttcaccggcggagcagagggctgaataatatcaagcagcgactcctgccccagggtcgtcaatgagacaggagcatcgcaaatcagactctccgaggatctggcagcggagcgggcagcctgccgagcagcctgtcgagcagcccatgactgctcatagcagtgcaatctccattgagtattatcgcgggcgaggtcaaagaattttttggaggtggactgaaggttgaccttttcgcgtggagtgaggtctgtttatcgccgagttatcagttctccgtcgaaatggtgcggggaaggtccggggcttacggtcgatgattttagacagaatctctaccggcagcttatccatggagagggatcaagagcattgagggcagtctcaggaggtaaagtcagccacagggatatcggccttttgttggagattctagactcttttcctgtcggctttcctccgcaatctgcgctccagaccagaccgtcacgcggattcaattcgcatgggacgaacgactggactagatgcagaattgatcgaagtacatgtacgtatgagaatggtctttcatacactgagtgatgacgtctggagggcgctgttgagataacttcagacccgggagacttttccgggtatgggatccactggattttatagaatgactctggagaaagggagaacattctgatatattccacggcacagccacctctcgacaacgatgttaaactaagaaaatgcttatcgttgacatggcagtacgcactcgtgttgttatatgtggaaaatacggaatatccttgccaaacagatcaagatacgttaatatattgttgaagcatatccatccatcttggaaatagaaagtatttgaatgatctgaggccaaactccagcccagcccaatttcccccaccatcaatcagtcataactcgtatatttgagataaattatgtaggcaaaagcattaaacaaacagaagatgacggtctatagaggcaagtagagacacctctactcatccggtctaaagacggcatctttgcaaaggatcaccacctttttaaagaaacgtcgccattcaagcggatcacctttgattttgacgaattccgcttcaaataacccctctgagacacactcaatgagcactttaccctggagtggacacatcctaccatccttggcaatcacccgaatcatggcagaagtatctccagaaccaacagcagggacaatcggaactggaacccccagtcggtggaatgcctcacaaatgagaggcacgagaagcttgagctcccatgcagaatagaaacgtgtcattgaacgcgaagggataatatcctggaacctttgtgcgttttgagttcggctcataggcactgaaggctgctgtgagaactgcgacatagaaggctcatcttcgaggtggcccgccagtgctgcatcctgagaggcaaacttcttcccaaacggctgggttgaagaaaagacatcaccattctgtggactgtcccagtccatcaacataccaccgcccagcatctctggctgtgtcgaggagaagcctgaagttgcgccgcagtcatccacatccataggatcaaagctgcgactcgaacccttcccagatcgggaaagagggtcttgactgaagtcgatatgaagcgattcaaacatcgaggtggcaagattaattgtatctctcaacttgccatcggtcgagaggtatttgtttgcacgagtgtaccaaggatgtcttcggacatcctctagcgagaatcgttttcggggattcactgtcaacatgccacgcagtagtgataatgtagcgggtggtaacttctgccagagctcatcggtggtccgcgactttgttgcaacatattcgtgatactcaaagctatcgtctgtcgggctatcccacggcgtgtttccggccaataggacgaaaagaacgatgccacaagaccaaatgtcagctaggtccgggtgatacccagctcctttgttctgaccccgactactgctgctaattacctcgggtgcaatatatggagggctgccacagaacgtggtggagagtttccgcgttcctttgtattcgaacagcgccgccaaaccgaagtctgcgatcttgagattaccgtcgccggtcaaaagcatgttctcgggcttgatatcccgatgaccgacgcccttggagtgcatgaagctcaccgcgctgataagctgggagaaatagacatgcgcaacatcctcgcccacgccctcgtcggcctcaatcttatcaaaaagatctccaccttcggccaattccattgcgatccaacgccacacctcatcctcgcctgtctgatagaagctgataatattcccatgacctgagacatgtctgtgtaccgtgacttccagttgtaattgtcttgcgctaattttcccatgtcgcgcggcgtaatctttgtggatgtacttgacggcgaaaacggggttgtctgaatccaacgggcaggctttcttaatgctagatagattcaaccgagttagatctagtgcttaccatggatctcgttcttaccatgcataggcaccttggccgatagtcttggacacgatgcgaaacggcacatcgttcgggagcggggccagctgcgaatgttgcattgcgaggaagctggcagggatttgagtggatgcgatcggatggaacggtgaaaacacgaaaggacaggaagtaaattaagattaaaaaggcataacgagtgggaaacaaaataagatgagatgtcgcgtcgaagcaagggtagcgagacgcgggataagacgcggaccactttatcctgatcgggtagtctgttgacaacattggaaagtcacaatacaagagggcgagggagggaatagcttcactttgtctggtatgagacggctctatactgcatgtgcaactatacaatgctctattattatactacgatatgctattaataccttgagcctgcagacccgcagttgatttgacgatcgcactaatttctagtcgattgtttgcttatattttgaactgtccttgtccttatatccagttaatatgactttgattctatattatcgagtataaatagagataccttcctctcaagagccctagggtgcatagagtgcacatgtaaaattcacctaagcggggttcgcgttgcccggggcgtcttaagcgccgagtaaacaaaacttctttttttccttcttcctctttgttcgcgtcacaaattaaatcccctccattctcacctttcatcgatcctttctaaattttcgttacatcaacctccccgtgggtcattgttacggatccggtgtcattccaaaccctcctgctactgttactagcatctagcattccacaacccggaatccacagatctcttactactatttcttaagaacctcgattgcatccgctctcgatccacaatggactatagtatggaagatacacagaactcggcgcccgaggcgcagcaagccagcaagctgaactcctctggtcaaaaaagcgacacccagagcgtgaccaaacggttcgcctccccctccaaacagtctacaaatcagcttgctctttgtggttacatatagctaaccccatctctttgatttgtatagcctgcaagccgagctcatgcaactcatgctctccccctcgcccggcatctccgccttcccggacgcagacggcaacctcctctcgtggacagcaactatcaccggcccgaccgaaactccctacgagggcctcacactgaaactctcctttgcattccccaacaactacccctactctcccccaacagtcctattcaagaccccgatctaccaccctaacgtcgacttctccggccgtatctgcctcgacatcctcaaggacaagtggagcgcggtctataacgtatcgagtgttttgctcagcttgcagagtttgcttggtgagcctaacaagtaagcacctgcccacaccctttataacttctatcatcgctgacattgacccagtgcgagccccttgaacgcacaagcagccgagctttgggactccgatcaggcggaatttaagcgccacgtcctcgcccggcaccaggacctggacgacgaatagaccgttggattttatattttttttctcattctgcatcggcgtcggttggcccgtcgcccacttcattggcggtgggatcgtgctgcaaacgcataacggggctggtttgcgccttggagttgttggtttacttggctatgccctaatttatcttctatcgttattactagtacctctgaacctccgcattcaggtacaagcgtgaggaattcttgctcttgagatcctcgggcggttccctctcgttttatttcttttggtcattcctcctaggatggtagatctactaattgtcgtgctgttgtagatcatttgatcttgtacacgcattcaagattctacactatccgcttaagtatataagcttcgcttgtccacacttcagtatatagttaggggggtgtactttatatcaaggacagagtcccactactaattctcgtacaaccgtgcccaagtaattcccccttaaaagcgaagaaacaaagataaacagaattaggaccgattcagtccaataaatttgaagtcgacgctatcagaattggccaaccccagaaataaaataaaataatacccaaacaaccaaataatcaccccccaaattaagatgtcgtggaggtaccgaagtactgcttctcattggtaatcaacaagccggcaatcgtggcactagtgaaagtgctaatggctccggtaaccatagcactaaatgcaacacgggacacatccttaccgcgaccaggtgcaatctgcgacaggacaccgatctggttaccgagggagccgatattcgcgaatccacacagtgcgtatgtaacgataaggcgagagcggtcggagagatccttgtagtctgcgttattttggagagcgtcgtaggcgacgaattcgttctgtggctgattagaagagggaattattgtttattaagaagggaaacttacggtaacgagcttggtaccaatcagttgggcaaccttgagtagatccccgtcccgggagacaccgaggaggaaggcaatcgggtagcagatgtatccgacgatcaactcgagggtcagtggggggtcgttgatgttcaggtatcggccccaccaagtgaggaggccgttgactagaccaatgagagcgatgatgcacaggagggttgatgcgatcatggcggcgatcttcagaccgagccaggtgccgctggtgaatgcgtggagggcgttggcagagcggtgttcgtcgtcatcggggaccacgacacggcctgcagtaagggtttcttcctcttcgggccaacgtagttttgagactgccagtgaagcggggatactcatcacacacgcgctgaccattgcctgtgggttgacaccgatgctgatataggcgatcaggacacttccggcgatggtggcgaagccagagcacatgatttggtgcagctcggccatggtaagatgggcgatgaagggacggatcagcatggcggattcaccctggccgatgaagggggatgcggcggcgacaacggcttcggcgccggaaacgcgcatgctccagaagaagaagacggcgaacttgccaatgaaccactgcaggatattgaagtagtacaagagctggacgaaggcgacgaagaagatgatggcggagatgacgctgacaatgaagaattgctgtggggcaaagcccttgtcaaagtagtagaaatcctcgctggttaggaatatgactccgtcggcggcgaaaccgagcagatcagtggctaggcttgagatgaagttgaagatgtcgtatcctgcagtggtgcggagcacgaacagagcaatgatgaattgcgccagcataccgacaatgacagtgtgccagacgatcttcttgcggtttcgagatgtgagccatagcccgaagatgaagaccaccataccgaacagactgactgcacggttggcacgggtgttatcctgtgattcttcggaaacgaacgagccaacaagaatcacagcgatgcatagcgcggcggcactgggtgttctgatcttctcgggaatgaggcgcacgaaagggtgagcggtacgcccccagacccagtgcatgggccttgacacgacagtaatggggacatagaagaagattattcgcagcgtgatggcaagatagagcaggaatgggatgagccatcctatatcatgtcggtgtaggatcaggccggcaatccaccaactatgtgaagagtatgtgtgagcctcgtgttgagtccaggatacagtagtaggatcgaagtcttcacctacccggtaaacagtagccagaccacggcatggaatatatgtctccattgttttcccacacgacgataccaagtgcgcttaactgggagagtctcgccggcttcctcatcgtcggagttcttcctgccgtggtccagaggtgtttgttcaggcacgattcctttttcaaactcgacatctttcgagtagaccacttcatcctgacgtccctgttcggcgaaggcggtatggtggtgatgagcatggtgatgctgatgctctggatccagcacaggatctacatggtgaacaacctgcgatcctgctggatcaacttcatgggttttctccatgacgatgcccctccaatcgcaacggaaggtatgaatgtaggcgccggtagcaaatttacaattaagagtgaaactcaaaaatacctcgagatttagaccgcctgtgattgttacccacaaggaaagttgatcttttataacaagtaagggcacagatttagggatctcccattggtattgtttgaccttaaaaacctgttggtttattatttaattattggcatacatattacattttctgggggatgagagataaagaacgcccaccaaggattagaacaagacactagcgtcgggccatctttccttctcatcctgtttggctggaagaatggccatgaacggattgaccgacggtgtacagcggagatcccgtctcgcctagagccagctagagccacctgcagccaaatgtaaccacattgacggcaaagatgataagggaaggtagcattatcttgccacggccacccctgtcgtcttcattgattggtgcaggtcaggctaacttgctggctaacttgtctcaaagtccaggaaactctctccgcaccgggtagttgtggatcaacatgggtcgtgtgcttaatttcccgtctttccgccgacctgagattgttgtagtttctccaggggcgcgtgatacccgagcgcttgagcaagggattggaggctgaacgtgaaaagaaacatatgtaaaacatactacacaacgtgtgtggcctgcattgtgcgttgtttcaaactccaccgatgtctgaatttgcttcataaatgtggcggtttagcgtttaaaaaaattggagaccagaaaggtcgataagagcagaggggtccgagatacacacgcgtggcctcctcagagataatcccccatgtacgaaagataggcgcttcagaagacacagcttggcgtccttggtcatggaaaaacgtgtgatctagaatagcttccaagacctctcaaggttttggtatattagaccattctgtgattgtcacctcgtggcttgggacgttggaagtcttcggggctggactgcggagcacgccgacagttacgtaatcacgtgagcccggggatccaccggactaaagttgaatgtcaaccatggaatgggaagggcacatccacgggtggccagctgccgcgaggcataaatctatcaacaaggtatgttgtacatgcgagacagcgtgttgggtaagaacatatctctggagactgtaaacagcctagtatagccgctgtggttgactctcaggcaatacagcactgtatgctttcaaggacgtaaggttttactgggaaacaaaagagaacaagagtacaaaattctcgacagcgactcgcagtccagaaggtagtcaagagcaggtatggcttatgatctagttaccaactaagtcactgggatccgctggctctactacactgactttgatacttaaccaatgaatgcttattaagttctcatactctttctagtttcatcaataatacaatcagcattctcgccttctaccatgcacctaggcatctacctatttggatagcggtggctgggaaacctgaatctatccaattacccgaacgattgcagaaaagagccactcatcatgcctacagagaaatgtgtcacccacgttgagtgactgttcaagcgatctatttgttatgtttactttgatatccggctatctaaaaagcgtcatataattcgagtcataacagactttgctacgaatactctccatccatcaagactggaaacgagatcatcttttccagtgtaccgagacagagcgagaaccctactagtcagggctaacgtcactccagccgtaacaggatccagctcgccacatgcacatgtgttctctgtgagtatttcgagatgattgcttgtaaagagaatagacaatagattgaaaggcatttaagtgtcagatgaaacaaaaatgaaaatgaaaagaaaaaggaaagtgatggtgaaccactgccgagaagcagtcaattggactagttaactaactaactagttagttacggagtagttatagaagcattcctgaggcatagatagcaacgcagacaccttcaaccaccttcccttaccttcccttcttagtagtcaccccatggtgttctctagcactctactactcccagtgacggccctgctctcatacttgtttcgcaggtagggctgtcagtgcccctgctgtccccgttgcagggtcccctcttcagtatgtgttttcttaccaacgggtcgcacacgtggttcgaattgttcaccccacccttcatcactcatcctcttttgcttctcctccttatgaccgttattccgctggttaacaacagaggttcacaggaggatccgaggccgaagcaatcttaagagactttcgtgacaagatctgaaatgtttgtatcttgagtgcaaatctcgtttcgtgtagagtggcgctgttttgtgaccgacgtggaggggaatcaaggcagatgtgatgctatatgcttcaaaatctgatgaagatggaactggtcagcggaactaggtccagtcaagctcaaacatacacactgatgggatgtgactgacgaggtgacgactctcttttgtatcgagtatcacggcgtacacttcgccgcaaatgtaaggccgaaaggcaatatttgctgcttaaagcaatcagactgcgagcaaggtacacgcaatctgaagagctgtactagaaaagacagggcgaagccgtctctcggtggatgtttgaaggaagaagaccgagaagaaaagtcctggaaatatctgaagtaggggagcaaacagatgttagtagggccctatggctactttcagagcatctagtacgcactgagtttatctctgaatatgttaatttgtttcgatagtgaacactttctatctttcgctttccaggagtccccgagaaccctacatgctaagacatcatatcattcaaattccaagacctgtatataactgtaaatggccattcatgatcagtacatctttatattattgtagacacactcgggcatacgatatccaatagacaaaggttcttaagtgcagtacttagtgaacttgttgatggtaccacctttaacacacacaccggtacagcaatcgccagggagaaggcacgggctgtgagctagtatcgcatgtagcgttagcctcgtattcctaacactctaagaaagtctaggagaggtatcatgatcatgatagaagcatacttgatctgcagcgcttttcaagagggttggtgtccaaagcagcttcggggtttgggacagcagcagcattggcaaacgcagcaagagcaacaacaaggacaactttgaagaacttcatagtgatcttatcggcggaagaagaaaaaatggtaagtgagatgttattagaggaaatgagcttctctttatacattttgatctgattatttcctggcccccagccagcaggccatacatgcaggatcggctatgttgtcctaatgaacttgttcgagttatctgatcttacgccaagccgtcactctccttcgctcggttgcggggccaccaatagcatcaagttactgaatccttcaatttatgcagcttcgctcgattggctctaaagaccgtacaacaaagctaagcatattactcggcagtaacgtctactcttggagcgtatttctagacggagagatttccgtaggcccccaggctatccgggcgacgattctgtatacgagagcttggtcaccttgcttttctcttcgccttcttgaagcctatatgcatagacgagtaatattttactttcttacggcgccaacttctatgcagggtattttggaaggttgaaatatccacgtctccatatcttcgtgagatgcttcttttgtatggcgaagtggaaaccgtaaactcggaaacatggctgatcattgcctagtctaaaagacccgcatagtaccatgtggagaggtgttaccttcctaatccgaggatagcgtactagaagagctattttagcaactgatcacattgtacgttcgaaaaatccactgccagtcgtgatgagaaatctcactatatgaacagaagcaatggagatgtacaaacaaacaaaatcataactgactggtgggtgtcttcttggggtctagatttacccattagaacaccacacctttgacctgagcaaccttgttcagattgatattcttgatcatgatagtccacgcaaatgccagagccatcacccccacgccagcagagagcatcctaacttgtgtatagccgtacgctttctgtattgccgttctcatcggagtaccaggagcatagctcagctgtgtctcgagatcttcataaatcatgtccaggtctttcaagtctggcagataccaagtaagagccttcttgtaagtgttgttccagattgccatagagatagtaagacctgcagaatctccgatggtaccgaccacgttgagcaaggcgagggctgtagcaacatgctggtgatcaacggcagcgagaatagatagctgctcgacaatgatgaagatcgatccgccaatggagatgaagatttgacacatgacctggtaaccaacactctgaccaggacgacggaagtagatcatcaaaccctgggcaaagatgtatagaggaacggaaatgtaaaggagccatttgaagcgaccagtttttcggatcgcccatccaacaaagaataaaagtataccagaaacgacgtcgaatgtattagtgatatacccagcttcggcaatagtgaggtcattaaccacttgaaggaaatttgagaagtagttgttccagcaatagtttgaaagctgatacgtggcatctaagaggcatgcaccgacgacggttcggttcgtgaggaaggagtatgggagcaaaggcgtaggagcgatatacctctcgtagaaagcaaagaagaagagcatcgagaatccgaccacaatcatggcaatgatataattcgtgccccagcctttaggagcctcgctggcaatgtcaaatggaagctcaaatagcacaagtcccgcagtgaagatgaagactccgattactatgatactattagttctctgtggatgaatcagttggtagttcggaatactcacaatcgaattcgagtgtccaaaaccagatgctttgaaggaatgatcgtccactgttctctctgataaccacagcatttccctttttggcttttgtcaggttgaacttcaggacgaagaacaacggcgcggccacgacagggaagatgatggcgaaagtaccataagcccatctccagccagtatgggcgtagaatagatccgccacctttggcccagcaaacgccgtaataatgtacggagaagacgtgaaagcgtatgcaagggctcggttcttcaactgggagagatcggcggtgatgacgtccacggcaaattgcatgcctccgaagccgatgtagtaaaacacctagatcccctattagcacatgttcaataattcatagatattcccgggctgtcttacatttgcagcgcaatagacagcgaaactgttgcaagaggccatcagaacaaggcctacggtggcgcaaattgacatcaccaggaacccttcggctcggccccaggtgtccatcatcttggccactggaaggaagacagcagccgaaaaagcatccgcaattgcggtaggaagaccagacaaggagtgttgttggaaagagctagccacataagtgctcaagctgccatcgattgacgatatccaggcataggtgaaatagaggaaccacatactattgaactataagattagcgatagggctgaaaagcgggtgaattgacttgcttactttatgaaaacgaagatcagggagactttcgaccaggtctgagccacagcctcaacttcctgaataccatgttgaagctcttcatagggcacacctggtagctcggcaccattgtttggaagtgtatcttcaggatggctgattgaaccctctgacttctccgcctctactgtgtttctgtctacttcgaccgaagaagaacttgcagcatcatcactgtcgactttcattcgacgaaagactgcccgagcccgttgtatcaagggacgaagcgtcatggcaatggatataagactcaaaattccaacgactcagagaggttgaaggtttcaggaagattttgaaaccaagagggaaaggcaagtaaaacaagcgaaattcccacatataaagtaaaacatcgaagtcggcacgtcggctagtagtattttgaacgaccgacaatcctttcctcctagatcaaaaatgttacaacatgcgtggtattaatataatgtagtccaaacatattcgttcaggccgtggacccttgctccactggggcctgcgacaagatctaatcagatcgtcagtggcttagagatctttaccacatccagttaccttgatcgagacccatcaggcccattcccttccaacgtcagtgtcaagcttcgtatagctgcttggaaatgtaccttggcattatgggccggccatattctctcaaccggaaaacacgggtcgataaaaatcttggaaagttatcagatttgccaagatttcgcattcatgggtaaacgcgtaaaattgatttctttcccctttcctacattagaatggacgtgtaactcaccaataggtcagccatttggctaacatatacgcaaacagccaagatctcgccggatgagaatctcagtacaagcctcatggcgtaacttaagccacccttggctcccctcatgcctccaccttgaacttttttttgagattaaggtgtttagcgttttttttttgtacgcaggagtctacataatccgattggccatatataattatgcgtgcatcccgaggccaattggaccgacactggatgttgtaccttacaacgcctgccggaaaagatatcttccggtatattatatttttcggtcaataacaacacgcgtgttttgtacacgttggcaagaattagtcactggaaagtcgcgatttcaacctggttcgatctcctttgatcagccttccggtggatcccgaaaatgactattacatattgctccgtctggatatgcattctcttttcgggtttcgacaagtaaaccacattcaaggccttgcctggagtatatcgatgcgtgagattgtatataaataccgccgccgcataacgatcgcctcagttcatcaggttcttgctattttggcttgcaggcagcaaccacatacactcgcgcaggcccagcttgtcagctccggacgaaatcccagggttgaaaaattcaccttcgtgggatcgtgtgcactcccgctgtaaacgtcaaaatcgaccgaaattcaaccatttccgatggtgtagactagcacagcggatgtaggaatatagtaacggacgtggaatcaagccaatatggctgttagattcgacgagatgggctatctttagtatgagaccatgacaatgacgtgaaatctggctgctaatgtattgcagccaacctccgaattcctaactatctcaatgtagtgtatcaaggccatcctaacttcaccctagtagaaatacaaacgtatcggggattggatgttcttgtaagctgtccatacgataaatgaggcgaagctcctagttcacgatcaaagaaaaaccaagagataagtctacaacatatgtacataccaccactttaattcactctatcttacatgattatttggtcagtggtcgttattgagctgttcattttgtcgcgagtaggaccggcttctcgatatacctatccacactaaaggatcaaggtatcttttcctgtacaccaactaataacatggaaggctatcgcacttcacctcattcgcagtttcgattcaaatatgtttccagtttgcgccaatcaaaagtagacgatacactccaaggctaccagacgaaaacggatatggcggggagcgtaactttcccctctcgacaatctggtcccactctgagtgtcgactctacaacctttttgaatcacttcaaatcatggcaaatacagagaatgaatgggaattggaggagggtatccctcagtttgaggatcccttcatccaacagtatctgaaaggacgcgatgctttaattatggaagagaaaaagcgacgtcatggtatttcccactcaagtcaagtaaaaaaacttcatatctgacttttgttgtagatgcaaatctgcgcaaatctttatcacctatcgccgcccgggcgacgaagattgtgtcacatatccgagctcaggaacagaacgagctgtggtcaagtggattgaatgagaacgcggcccaccaggcagatgaaatcctgtaccccggtgtcatgttcaatctggccaaaggccgcatggagacgactaaactatggaaaatcgtggaaaagatgcccaagggttctctcctacatgcccacatggaagccatgttcgacatggatttcttagttgacctggcattctccacgcccggcatacacatgttagcgccgaagccgttgatcacagccaaagattacgaaatagcgcccgtgtttttcaagtattcctcgcagcctctagaaagatccgaagacaagccaagtatttggtcggaggcatacgaggcctcgtcattgatctcgatccagaaggccgcctcctctttccctaacgggggagagaagggtttccgggaatggttgaatactcgatgtgtgcttatgccagagcattcgtatcaccaccatcacggagtagacgcaatttgggctatcttcaccaagactttcccaattgtcggctctctcgtgatgtacgagcctatcttccgcgcctgtctcttccggttgctcggacagcttgccaaggatggagttcgatacgtggagttccgccttgcatttgtcttcgaattccgaacggaaggaaatgaaaaccccgaagaagactacttccagtggtgtcgtgtggtggaagatgtcgtggctcagttcaaacaaacggacgaagggaaggacttctacgatcctcgcattatttggactacgctccggtggtttgacaacgagacgattgtcaatagcatgaagcagtgcatcgaaacgaagcaggagttccccgctctgatcagcgggtttgatcttgttggtcaagaggataacgggaggccgctagtcgaccttgttcccgtgctcttttggttccggaagcaatgtgcggaagaaggcgttgatattcccttctttttccacgctggagaatgtctcggcgacggcgacacgacagaccacaacctattcgatgccatccttcttggcactcgccgaatcggccatgggttctcactttacaagcatcctctactcattgatttagtcaaagagaagaagatcctcgtagaatgctgcccgatttctaacgaagtgctccgccttgctagctccatcaaatcccatcccttgcccgcgttattgtccagaggcgtccccgtttcgctgtgcaacgacgaccccgcaattcttggccacggaaggaatggattgacacatgatttctggcaggttttgcagggacttgaaaatgtggatttagtcggcctatcaatgatggcccagaactccatccggtggagctgctacgaagaccagtcgaccgccgagtggaaagctggtattcaaaatggggtaatggggaagggactgaaatctgaacgtctgcgggatttcgcttcgagtttcgagaaattctgcgagtgggttgtgctggagtttgctgagtacgatgttgatgttggggatgattgaagttctgtgtccaaaatatacgagtcatatacttagtaacctagcacgaacaataaccaactaactatgagaacacgaaagttgattttggtaatatttcaactggtgtaagtgaaattttatcaccatcgaagtaatttgaaacagacaactcaatgagaagataattggtcaaatctggtgtcaatcggtgagttggcacgtcggcgcctgactccggtacttatcgcgcctttatcaggtgcccggaacgtcattgacgaacattccctccgtcacgacctcccatccactccgctttgtcggagctggctgatttattgtgtttgttaagctattttcgatgatccgagtcggcacatgaacgagccctgtcccggctcccagtcacgatggcgtcgtactttatgccatcgttcttccagaagcggctcctcaaatatgccctctctcgcctgggcctggtcgacacagaggccttggatccagataacttaggtatccgctggggacaacggtctatcatcgagttgagggatatcggtctcaaactagaggtgagtgagtgggtgcagtgagcctccgcgggcggcggggcggcctgtcgtgatcatcgaacccgacctacagagcagtgcgggctaactattcacatcgcggaatagaaactatcgacgatactcaatcttcctccgtcgtgtgagctgctcagcgcccgtgttcagcttcttcgaatcaccctccctgccgatttccacaacagcgggatcctgtgcgaggcaaacggcatcgacgtacatattcggttattgtcagaggagccgaaaaaggaacaaaacacaaaaaataaaggcggaaaagatgactattcggcggtgcccacaccatctggtcttgcggagtcattccttgagtccgagccaaaggaggagagggaagagctgcaagccgcaatagcgtcacagtcacaggtcctgccccatgacccactagcctggtctgtcgatgacgatgacgaacttggcctcgggagtgatactctatcactgccgagctttgtggccgggttcttgaaaggcgttgtggatcgactccaactcaagataaaggatgcagttgtgcgagtagatatggagttgaagcaagatggaacgtcaaaacggcagcctgaacacaagccggaccttgtcgcgggtctgctgagcgtcggggaaatcgatgtccacggagtatctgagaaaactgttggtccggacgaggctcttccattccgacaaggaaagcggttgatatcaatcgccgatatcaacgttggtttaatttccgacccatcggtgttctcgaactactctaggtttgctgcccccgcatccccatcgacaactatgcgatcaaaagggagcgagccgtcaagcagagcgtcatcaccctctccgttgtatcgctctgttgaagaaccccttgctatgacccaatcaactattttcgagccgccgcaagcttttggtcattcaagtactacctcggacgatttggaggcatctgcattttcgcacggtcgattctcagacgccgactccgagtcaggtagtcaccacggtggatacctggaggattctcatgtatttggagatgaccccttccaagacaatcctgggtacctagactcggttatagacactcaattcgatgatttcgatgatgagcagtcaccagtaatacatcctgaggaagaccaacggttcaggaatcaatggggaagccacatgtctcatggcccacaaagcttgcaccacagccaacgggcggaatactctgatgagcccttgcttccgtctgacagccatcacatgtcccggacttacgaaacacataacggccaaattggctctgaaattgacgaaaccacgccactcacgcagcattacaacgattacaacgaaaatgaacataatgaaagatcacaattgagcgtatcatcccattcttctagtacatctccacgcccagagcccgagagcacgggcccacgagaagaaaccccaaatgtcgatctcaacgagtccaggcttttctctcatgatgaagcgcaaagcctttacatgagtgctatcagtcaggatgtgggtgacagcttcatgcctcacataccaggtggatggggctcgtttaatcgtggatcaaaatcccgaagtgctttggatgaccgatctaaaataaccgcgcccattgacccggcacagtccatccaagttcaagatgaagcaaattcaaggtgcgcatctccatcaggagacaatgtcaccgagggacatgatctggacgaccaaggccaatctcagacattgcacaaggacagaccctcaacttcatcgtctcctgggttgcacagaatcaatgaaatgaggaagtcgatattgactgtggataagattttgatgtggttttcgcctcctgcttccgaagaagaggcgccagccctgtcctcgcctgtgccgcggaaagagaacgcagagagtgacctaactgaatccacagttagctttggtgactctgcaccagaggaaagtctacttgcctctagactttacaaatctacgagattcggaagagactttgttgaggcacgggcccagtcaagtgctggacctgaactgcctgaaattgcggtggaagtgttctctatctccgtacattttgatattgcaactggttggctcctaaccaagataggacaaaaattgtctcacgctgttgatacggccgaaaaagatatgtctgcgaagcagtcacgaaaagaccagccggcgcgcacaccacctgttcatcttgccgtccatgcattttcaataaaattcattgaacatgttccagggcatgtgtattcgtccgacgataatggctcgtcttcgtctcctccctacaacatggacgatgtgatccttcgtctttccttatctggtctagatgctcgtctttcagctcaaagtgtaactaccaagctgaagcttcacgtgtccaagtttgcattcgggttcgcctccgaggatatcatattctttgatgaaagattgaagatgcgtgaatctacgcgtgatgttttatcaccttcgcagggagatatttctatctctttggtcaagtcgtcagacctgaccaaggttgacatctccacgctacctctccacatcaatctcaatgtacagcggctggaagaggtcctaggctggatgggtgggctgagtaccattcttgaacttggaagttctatgtcgtccgtgtcaacggttaaaggctgcccgccacctaccaaggcgcgcccacgtggtgtgcattttgagacatctgttccagctattgacaccaccaagggcaagtcagccccattgaaaatcaatgcccgagttggtgccatcctgttggatgttactggtgaaacccattgtcttcaacttaccacgaccgccgtcaaaatcgtcagcagatttgaagggattggtattcaaatagacaaggccaaggtgattggtccactttcaattgatgatgcttcatctgatactcccgccaaaatcacccttaataacatccgccttgaattcctttttgccccgaaggaggtcgatctcgatcgtcttttgacattgatcactccgtcccaggacaaatttgaggtggaagatgatatcatgctagacacgctgttgcgccagcgacgacaaggatcagttcttcgtgtgacagtcggacgcttagaaacgttcatttcagataccagcggtttagagcctctctcgtctcttgctgtcgagctgagtcggctttccaatgtcaccaagtatttgccggaagatgatcgccccggcattctcactttgatgctggtgcgtgacttccaaggacatgtccacgttggcggagaagtcggagacctcaagagtcaactcaccgatgttgaagtcgcacacatcaccatgccttcgctcactgcggtccaaattggaaccatgaccgtcagtcggaataacgatgaagagctggtgggacaagccctgtggccgccgaacaggtgtgaggacccagaccagtcctatccgccggtcctcatggctcgtttcatacccgatgaaatggatcctacctacaagatcaaactgcacaatctccttgtcgagtacacggttccatcagtgacggccttccttggattgggtggcaacaagatgagcggggatctcgccagtagtatggtcaactctattgccaaccttgcagagcactcgataccgtcatcctcgatgacaggacgacctatgtcgactgaatccagctcctcgacaaaacctgtcaaattggcagtcgtattcagagattgtgttattggcctcaacccccgcaattcccatgcaaaaggcctcgcagttctcaccaatgccaagttcggaggaagccttcatggagacgaatcagcagaagcatcgttggatattagaaaagcctcgctcatgatcatcgacaacgtgtaccatgaggaggcctataacctgcaccaacgaggatcggtcgtttcccaagacacccaggctcaagcgtatatcgataaaggttatgttcctgtttcttccatctcatcggcaactgctagtgtcaagcttaccagcgcggaggatgggacaaagtctttggacgtagagttgagagatgatctgttgattctcgagacctgcgcggattccacacagacgctcatcagcatcatgaatgggctacagcctccaactccaccgaacgtcaatatgaaatatcgaacagaggttatgcccatccaagatatgtttgcttcgttcaccggggacgcatttgctgctaatccccccatttccaacgataatgatctggcaactatccccgaagggtcatccggagaagatcagttgaccgacgaacttgaatacgttagcgatttctatcccgtgaaaggtggccctggtggtgtgggcgttgagggcatggaagcgggctccaatgatctgctggacagcttccattcccaataccaagtatcgtccagcatgacggaattggatttccaggaggaccattttgcaaagaaatcagctgtgggtggaacggcacatcgatgggattctacccagaacacctatggcttcaccaacgacacaaagctcgagcggagtcctttgcgtgtgcgggtgcgagacgtgcatttcatctggaatctctttgatgggtatgactggcagcgcacgcgtgacacaatatccaaagccgtcaaggacgtggaaatcaaggccacagaacgccgttccaggggctcgcaagtgtcacctttggccgaagatgaagaggagtctgtcattggcgatttcctcttcaactccatttatatcggtatcccagccaacaaagatccacgggaactccaccgcgagatcaatcatgacatcgatgatttcactagtgagaccgggagctatgcaacaaccgctaccctgactggggctggaagtcgccagggccggtcaggctctaagagggagaagaaattgcgcttgcatcggagcaaacaccataaaatgacgtttgagttgaagggggtctctgccgatctgattattttcccaccgggctcggaagagacccagagctcgttagatgtgcgggtcaaggatctggaaatttatgatcatgttccgacatccacatggaagaagttcgcgacctacatgcgtgaggctggagagaaggagagcggaacgagcatggttcaccttgaaattctgactgtaaagcctgtgcctgagctcgctgcatcagagattgttctcaaggttcgttacccagtaaaccataattcagaccagtactaacttgactcttaggtcactgtcctaccccttcggttgcatgttgatcaagatgctctcgactttatgagtcggttcttcgagtttagagatgaggccgccgaaccatctgatactccgggcgatgttccattcttgcagcgagtagagataaacgccgtgcaagtcaaattagacttcaagcctaagcgggtggactacgcaggactccggtccgggcgtacaactgagttcatgaacttcttcgtgctggatggcgcggacatggtactacgacacgtgatcatctacggagtgtccggattcgaccgaatgggccaaactctcaacgacatctggatgccagatgtcaagcagaaccaactacccggcgtgctcgcgggtctcgcgccgatccgctccctagtcaacgtcggcggcggcgtgcgcgacctagttgtcatcccaatgcgcgaatatagaaaggacgggcgaatcgtgcgcagcatccaaaagggcgcactagcctttgccaaaacaacctccaacgagctggtcaaactcggcgcaaaactagcgattggcacacaaaccgtcctccaaggcgccgaggacctgctgactcccaacgcaccaaccttcgacgacgactccgcggacgaagacgaagccaagaagatctcactatacgctgaccagccggttggagtggtacagggactgcgtggggcgttcagtggcctcgagcgcgatctacttttagcacgcgacgcgatcgtcgctgtaccaggggaggtggtcgagagtgggagtgccaaggcggccgcgaaggcagtctggaagcgtgcgcccacggtcatcctccgacccgctatcggggtttccaaggctgtgggacagactctgcttggtgcggggaataccctggacccgagcaatcggcgcaagatggaagatgtaagtgatctccgcggagccctgttttggttcgtggctgtggctgactacgattttagaagtataaacggtactgagactgagagtgaggtgcacgaggggtggtttggcccttgcatacttcgtacatacatgcatatttgttggttccttttctggtttttgatttgattttgatttttccgagttcaggttactttcctctttgcttcagttcgataccacatcacgaccgcattacaatcttaaattgctcttgcttgttctttcacatacttccagggattttcagtttcagtctatatgacgtgggagtcccgagttcaataaatgatcgaggtcttaagccagatctattgctacggatccaccaagtaccagaaccagaagaagatagcgaaaagcgatgtcgatcgcagttcgtacaacgcggtagcgtccgagtatactccttgaggcagttgccaccatgaagactccgtaccacattaaatcactggaaaattgtgtaagtcccgacgatcacctaggcagcctgtcacctgggcagcctggggcaacgagccagcaatctgtttaaaattgcattctgcatgctgcatgtgaaacaaatctgggggttgcagtaacattggcagatgacttgggcacaattaaagatgagctggcatgccgatctatgtacttacagccaacgtgtgcatctgcatgtgtgccttgattctctcaggtacgagggtacctcgtacgaggtgcccaaccatggaacaaagatcaagagtccaagtccagtccaggccaacagaggacataatgtatgtgtacgtactattccacttcctcccagccgaaagacgacacgaatcagccattgcgagagtccagatagacgagataaaacccgtggttccttgcggactgcatcaacggtgcatcactgcaaagtaccccatacatacccaaggtacggataagccctgggaaggaagtccgaccatgaccaagtcatgatgttgccggtggagaagggggaaaaaatattttcttttgccacatttgaagtcgaaccggatgtccaatcatgggggctggaccccacagccgaaaggaagatttttgcctggctcggtcgtgtgctaagacacaggttcgttctgttcgccgactggttctgggctttaagaggcggttggtgaagattagggattggggtggatgattggttggaaatagatggacgaaactaactaacggactagactaaaggggagatcgaggctgagatcatctgcaggtgatttgggcgcgacagaatattcccttactagtatcattcaggcatcctagcatataacatagcgtataacatggttctatcaacatatatcaacataacatccctatacaaagatgacgtcgaccagttgatcgacgaaccatgggtcactgacagtccggtctcgaccttttcctttgcttttctcttcttcttcgttggatcggtagggccggcttcccctggcttttaactagttcgactgggtcgatgggtcgagttcgactggctatagtatactcattgttcgtgattgagtggatatactctgagatccaggcacattccgttcgtcccggtttatattttctttttcttttcaacataaaattgctctccctgcccttctgtaccttgcagtcttgtttattgtgatccattgacatcttgcgaccggtaagcctatctcctatcccttgcggcctgaatctgacgaatcaagttcagtgtggagaagtgggtttggatctactgcattggatatgtcgacaatctaaagagaggtttgagaaaacatccagaagcaggccttcaagcagacacgcgaaatcggggatattcgcaattccaacatgaatgaaatcctcaaccactccgccgccaacgacatatggcatggcgagctgctggacagccccctctgccacaaatgtctcgatctccatgataaccatgcatgtactactcctctttccaaaccttttttggacgcgggagacgctttgtccctcccccctcgatccatcaaatctcgtatcacgggagacctttccatccacgactaccacaagttcctctccaaggctgcagaccgcattggcgatcccgtcgatcagacaggaaagaaattgaagcgaaaaactgctgcgttgcatttgaatcgcccgtcccctctttccatctcttatcctgtatctatatcgtccgtggcctcgagtcctccgccgctgtctccttcctgctcgcaaagcattgtctctcattggagtgaagagcctgagatcggggaagcccagactggtaagcatctatgactatccggtcgattctctcgagcatttattaacacttcatagttcagtaccgatctacacaaagccctggactccccgttgtctcagatctcgggaatcgtgctagacctaacaggaaacgattggtaagttggctgagacactacacaaagacccagctcacttattatagtccaagaatacctttagggaaaagctccagcaaaaggcccaagttcaagcggaagaagaaacagaaacagaacctgagtctgcctccacacctcaaccctcggactcaatgctggccagtacgcaggccgttgccaccgtctcacacggtggtgcctgctttgagatcctgaatccgcgcaagtcgctggatctagcacgcatcgtctcatacattgaagacgtcgataattgctccgtctccacagacaatacccgagactcgactttttccatcgagcaaggactggaccgggtgtccctgtcccaattcaccgatgcctcattgccatcattctattccagcaattcgttgtacacctctatctcacccgatccctcgacagccaaaggtcagccggcggatatcacctccccgcgagtcggcgaacgcgtccggtctctatcagactattctgtcaacgaacaaagcttcaactactggagccgacctgcacagagcactgacaacgagctacccttcgaaactcatgactacccaagcagcggcagagagggcccacaatcaccacccatggctcccattacggaagaaaccagccttccaaatctagatttttcccgtcgaccttccaccccatccacgcagaccttctattcagaaagtgagatcggcgagccgggctcacccgtctacgcaaacggagattgggctcaagtcgacgagcgcgacagaggcatcttattcgacgtacgggaagacgaaacaacacccgaccactaccacgactattcatcctcacaagaacatcaagacctgccaacaccccgcgaaccgcatctcgagacaccaagtggttcacccatgcactcgcccatgtactcctccttcgactccgcctacccctatccaacctcaatctccactaaacccccttactctagctccttcgatcccttcacctacgacccggtgtacctcgacccacacgtccagtctgttctcgcagccgcgaacgcagagacgatggggttacggggtaatcctgcacgcgcactggatgagctgcagcgaggggcgcccccccggcgccnnnnnnnnnnnnnnnnnnnnnnnnnnnnnnnnnnnnnnnnnnnnnnnnnnnnnnnnnnnnnnnnnnnnnnnnnnnnnnnnnnnnnnnnnnnnnnnnnnnnnnnnnnnnnnnnnnnnnnnnnnnnnnnnnnnnnnnnnnnnnnnnnnnnnnnnnnnnnnnnnnnnnnnnnnnnnnnnnnnnnnnnnnnnnnnnnnnnnnnnnnnnnnnnnnnnnnnnnnnnnnnnntgccacccgccggcgattcgagttccaccggagaaagagtgatgagcggaagactcagaagaaaaggctgaggaagttctttggttggaaatctgggcattagggagttctgtgaacttgccttgtgtccgttacagctggattctgtgaatcgacagctggctgtgtggtgacttttggaccgggaattcgattatgatttacgtccattatgatggaagagcgaggcgcttcggtgttggattggattggattgggtggactggctggatacgggtctcgattcttttcttttgttcttttctaccgtgtccttcttactactcttattacactttctttctgggtctgagactcacattgtatctatatcattttacttacattgacgcatgtcaacattccggttatctcaaacttttgaactcaatcattatcctggaatagcagtaacctttgtaaatgtccacaggaacgggtctactaacgcagatcaatctccaactccggaatatttctttctttatttcgggtatcaaatcgaggtatatacaacgccatccatggaaaccaaaatgcaacatcaccaaccttaacctaatctaaacccaacccaccccaacccaacccaacccaatccaacctaatcatcatccctctccaccatcgacgccaacgccgcactaacaagactcttcctccgaagaccctgctcattcctcttcccaaacccataatggctcttctcaatgcgactcgccaaaaccccagcggaagaactcttcctcctacccctcccctccgccacaccctccggcccaaaccgactccgcgacagcgcaaccgctcttctccgcggcgacgcccgcggcggcaacgagctgggatgacaatcctccccgtcgcagaggtccgccgacgcagaagggtcctccatcagcgagcgctgcatggcctcgacctctgactcgttgcactgcagcctagagatctgctggcgctgcatgcggacgtcatggtggtagggatgtggctgggggtagaaggggcgttcggagccgaaagctggtaggtcggacatcaggtgcggggggaaagtcgggcttgttgttgaggaggcagagggcgaggagagacagtcgacaccggagtcgtcggagtggtctgtgtctggtggtgtgaggacgtagcctgcgcccggggagcgccgggagccttgtgtgtgtctgctggctcggttttggtcgcctagggtgtgttcgtgcagtttctgcgttagggttgcaatcgataggcgcttgtggttgtggtctgagtcataggggaaggggacggaggttgggggttgttggttttggctttggttgcgggtgaagcgcgagcgcgagatgttgcggaagcgttgggattgtggtgagggacagcgtgaggagagtggggagattaggttgctgtcgctgtcgaccattagccggtcgtcggtgtcgagggcgaggcggtcgggtcgcgacgacggcgaggtgaaggagaagttttcgaacattttctttcggtgcttcggaggcgagggcgacgtggcttgagggtgtgttttgaatattaaggttcttgatctgcgttttctttgacggtaatgttgtcggggttgtcggcctttgagagttgcgatgtgggtttcgagccggaaattgaccacctacacttggaggtagtggacacggtttcgcacagtgtctgatcttcgattgatatagcgtagacgattatttgcccctcgggggaaaaaaattggttgtcgaccactggttgaggttgaggcaaatgtccacgtgatcggcaaccactgtgcggcagcgttagcacagacaggggtattttttctatttttgttgatttggatttttgtatcaaatcaaagcatttaagcagtagttcggtttcaaattcaatgcaatgaatttcttcgtcttttttctttttcttgtgcattcccctgcaagacttgcaagaccctggttcttaaatgcatgtcgatcctcatgtggatacccgtgccctaagtcgatctgcatctgcggactgcacgatggatgtacggcgtatggtgtagtaagtagtgtggtgatcttgatcagatatatattcaatcttgcattgtttgcatctgctggacttgcctactcatataactgggatttcctggcaaaatcatcgaactatgtactagacacgagatatatttgtgcttcactgaagtaaatattattagaattttactctggcgactcaacgcatgtacaacagataaatcccatataatattacgccccaagtcagtctagttgaagttgtgcatccaatagatataggcattgtaaggggtagcgaccataatccaagtaatcaagttgaagacatatagcaaggaacaaacatatgaactcaccgtaataggattaattctggattacgtcaataaagcgaattttctgtgtaggtgcgaagaacaaagtgattagagtgtcatatcattcaagctcgctgtttgtaatagaactggatagaatcccaagtgggttagacgataggggctatgggtgtggctaaacaatgctggagtcatgtaggtagaactaaatatgtggttgctgtataaagctaaagctcagctgggtggacacaactgggaggtcgaggacgtgatggggcctaggacggactggacgttggttaaatatcaaagtcagtgtagcagaagtaaggacacccagtggcctagttggtaagtctatcgagcagtaccgctctagactaccctctaggtcaactgcctggtttagaacactgtcgagaatttcgcactcacggctctgggttcaaaccacttgtccactttttttatcctttttcttctctctccctatattagaccctctaggtcaactgccaggtttagaacactgtcgagaattacgcactcacggctctgggttcaaaccgttcgtccacttttttgatccttttttttctctctccctacttttgttatatgataacagttctatgcttttcctacgcctttaaaaagggtagatgatatttgacatgacattctgtattctgtcaaggcattcactgtatgtcaacaacatagacttcagtatcaaaatgtgcgtcactcatcctattgactttgaccttggcgttctcggtcacagaaagacgtgtggtctagaatgaatctttagtctaatgcatatagtagttgactctaacatatcgctataattttacatggaaccatatatgataaggaaaaggaagttagaaggaagtgagggaagtgagagaagtgtggtgaggcatatacaaggctacgtgccgcctcgcttccttctcatctccatctcttcacttgcatactcgcttcacagtatggcagctgaacttcctgcaaaccaattacgtcttatttcgccaaaaccaagccctgcagatttctcacctcgcaaatgaaagacgactctgtctcccaaatccatcctttccaaggactctgtgctgttcttgccccgaagttctcaattacagcccttgtctgctctacctggatttgattcaaaatcattgggaagtgataacgatactttcagaattgaaaagctaatgtcagcagatctgaaatctcctccgtctctccaaccaatgtttcctggcgccatcccacattatactatatccatcctgatcatgtaacagagcctactttacctgacagacaacccaaatgatgcgggcccagtcatccgctttcgctatcgcagtcgcgcccggatcgagatctcgcaagaccttgaatcctaatcaccgaggttcaggtgtgactatgatgaagatgttatggataacattctcaacggctgcaaaatgattcttcattgcgaccggatgactctcaacataatacgttaaggccaggagtgaaggctagctccggtgcaaaaataaaaggaggtccaaagccttcctccttgggcgtccttattcggaatcttttgggctctgggttcataaccgctgctgcccaagggttccattcgaataagaccgattcccacattcataccggtggcagagtaatcggcaagcttatcatggaacccacacataggttgtgttgttaagattgacgatgcgtggaatttgtgaacgaaaacacctcacgctagctactccattgactccactccaactccactccgactatttgtttatagcccaatatagaactttatacggagtataccctattgtattccagtaatgcttctaagattcatataatgtgagggtgtatggttggataatgtatcaaagagacacgcctatcgaacgagacaaaattggtccagaacatttccaaccatatgcccttcaattaaaaaacttatggattcataactcatgtttccatagagtgtagtataaaatagtgggctgttctgtattcgcagacaaataagttggttggttaagtatcaaagtcagtatagtacgagcaaggacacccagtggcctagtcagtaagtctattgagcagcgcctgctctagactaccctctaggtcaactgccaggtttagaaatcattttccttctctctccctatattagttcctaaagtataaaggagtatagaaaaccaataagcatccgttggtaacttgatcgaccatgagccatactgctctaggctatactctaggtcaaccacctgcgttcgaaccccctgcgagtcgcagtcgagaatttcgcacccacggcactgggtttgtacactctctttttccccttttccccttctctttagtctatatttccttttgttcctcatatcaccttttgaagtataacagcatggtatggcctgcatattagatacctgagccgtatgccatcgtcctgtatgacttggtggatatcctcctttctatttgatatttatacttctatctgtttctcaattagatgccacaaatcttcaatcaaaatttcttgggtaaagcacgcatgtctataaatattcatggccttccgggctgtagataagatattctatgggagctgttgataataaacgcctgatggctctgccgctactcaaaccaaggttttgtcccgaaggacgagaccgaaagggggaagtcaggttcaaacaaacctcaatatccccttcacgcactcactcgtcttcatcatctggcaaaatattcacccaatattttctggggaagaggagaggtgcttgtggctcgagaactgggtcttgcccactagccgcattgacggcttcggctgcagcttctatttgctgttgtttgggttcgatatgtctcggtgcatacccttggtcttcttatggcctagtcgccggcatgactgtttggcccttcgggggagggtaggatcagatgagggaggcgaaggagggtatcgtgcacctgaatattgtcagtctaaacatccaacatgattgcgacgagagatggagtattgacagcctgaacacgcgcctcgcagagatggtgatgccaatgaagctggtccttatacccctgcatccttcgtcggttatgatatgcctacaacttcttcttcgctggtgttcttgggctccattcccgccgtttttgacttcgtcactcataacagtatcttcagtaactgtgtcagtctttttgcgattttgcatactgcttgcagccatctctgaggttatatttggtgaaataatgaaaatggggatgaaagtgggagggaagtcagaagggattgagaaaaaatgataattttttctacgtgagatgtgcaaacagcctgtgtctgtgttgctgaatttgctagcgtctacgtctgttgtccagtcatcctcacactagaaaagcaacaacgcgcctaccacgatcgaggagactaatatatagaaagattgtctgcattttataaattttgccacctcctcgttcatctctgacttactagaaaattagcttgctgttcaagcatatagcatgttttctatcctggtgtcaaaatgaataaagcatcatatcatccaagctcgctgtttggtcagaataaacactactttatgctctaagtatagacaaggggatgtgaaccagcagaggtaaaaaggataaaaaaagtggacaagtggtttgaacccagagccgtgagtgcgaaattctcgacagtgttctaaaccaggcagttgacctagagggtagtctagagcaggcgctgctcaatagacttactgactaggccactgggtgtccttgctcgtactatactgactttgatacttaaccaaccaacttatttgtctgcgaatacagaacagcccactattttatactacactctatggaaacatgagttatgaatccataagttttttaattgaagggcatatggttggaaatgttctggaccaattttgtctcgttcgataggcgtgtctctttgatacattatccaaccatacaccctcacattatatgaatcttagaagcattactggaatacaatagggtatactccgtataaagttctatattgggctataaacaaatagtcggagtggagttggagtggagtcaatggagtagctagcgtgaggtgttttcgttcacaaattccacgcatcgtcaatcttaacaacacaacctatgtgtgggttccatgataagcttgccgattactctgccaccggtatgaatgtgggaatcggtcttattcgaatggaacccttgggcagcagcggttatgaacccagagcccaaaagattccgaataaggacgcccaaggaggaaggctttggacctccttttatttttgcaccggagctagccttcactcctggccttaacgtattatgttgagagtcatccggtcgcaatgaagaatcattttgcagccgttgagaatgttatccataacatcttcatcatagtcacacctgaacctcggtgattaggattcaaggtcttgcgagatctcgatccgggcgcgactgcgatagcgaaagcggatgactgggcccgcatcatttgggttgtctgtcaggtaaagtaggctctgttacatgatcaggatggatatagtataatgtgggatggcgccaggaaacattggttggagagacggaggagatttcagatctgctgacattagcttttcaattctgaaagtatcgttatcacttcccaatgattttgaatcaaatccaggtagagcagacaagggctgtaattgagaacttcggggcaagaacagcacagagtccttggaaaggatggatttgggagacagagtcgtctttcatttgcgaggtgagaaatctgcagggcttggttttggcgaaataagacgtaattggtttgcaggaagttcagctgccatactgtgaagcgagtatgcaagtgaagagatggagatgagaaggaagcgaggcggcacgtagccttgtatatgcctcaccacacttctctcacttccctcacttccttctaacttccttttccttatcatatatggttccatgtaaaattatagcgatatgttagagtcaactactatatgcattagactaaagattcattctagaccacacgtctttctgtgaccgagaacgccaaggtcaaagtcaataggatgagtgacgcacattttgatactgaagtctatgttgttgacatacagtgaatgccttgacagaatacagaatgtcatgtcaaatatcatctaccctttttaaaggcgtaggaaaagcatagaactgttatcatataacaaaagtagggagagagaaaaaaaaggatcaaaaaagtggacgaacggtttgaacccagagccgtgagtgcgtaattctcgacagtgttctaaacctggcagttgacctagagggtagtctagagcagtactgctcgatagacttaccgactaggccactgggtgtccttactcctataatactgactttgatacttaaccaacaccgctcccttctgaagttctacttttggcaacttatttctctgttgtctccatgacgaattactgcctggcctgcttaaatctcctatctatcgtttatttcctcctatacaattctctgttgttgtttcatcgccgccaccctctttgacctcggggaatatcatatcttccaccagcagctctggctaacagaggaaacgggctcgtttcgattatattcggtggctcatacctctatatggtctccaatacgctcgagcgaggtttgatttccaatttaacataccgatctcttgctagtgttcagttatcggtactagttttacaatgcaggcgcttcataaccgccttgtgatcgacaatcggatccacgaacagcttttggagtctacatccttggccatttttgtcttcaaacgttaaggttttgatgatttgctcctcagcaacacagttattttccccagaagccaaaaggcaataatgcttttccgaacatatccagtttacacgccaatccgacgaacaatgcatcatatgtcagtgagggtggaagacaaagaatgcatgccaacctgaatacaagtgttattgtcgtaattctctatgaatcgcctattacaaccgttgtttctgaggaccttctgcccgagcataagatgctacccaaacatacgatcatcccaagaaatgataggcggcgactttaaggtgcttctgatggtagagttactccttattcagaattgtttctggatttgataattttctcccaggggttgcattcaaataccatgacatatctcctagtaccatggctttccatatctcgtatagcctcaatttatacgtttaaatccaaactcatattttttgacaaggacagtctaccaatcctctctgtccaaatgctggttatctttggtgactcttggctcttcgaggtggccttgtgataagtctattttcacacgtataaagccctcataggagatacagcacccaatcccaatggaaaacttatactttggacttttataaagtttagacaaaagatactcgtacttgaagcgatagctggaagatatccgcgtgagacagacttcgtcagttgctacaaacaggtttattgggaaggggagagacctccccagtcaaacagagaatgggcgcagtcaacgaggaaggtgctcagctcttcaaactccccgcgcgtaaaacatttctcttcctctcctcttctcttttcgcatctcatcccatccacctttcaaaacagccataaccatcacaatggaagaccctctttcccggggggaaaccccaaagaataagaaaaagcggaacccaagcttccgccgatatctacgagaccatggaattgatgtcgtaagtacttatatctactctggtctcaacccgtcgaggtcttctgcttgtcccatcatagctacgcatcgtatgatctgaattaacattttggttgaattagccttcgcttgtgcagggagtacgtgaccctgcgcttcccctaaagcgcaagcgtaatcatcgccgctataggcaaaagaaggcgaagaagataggtatgttttatggtatatatgatactgggtagacgctaatgatctaaagagacagaagctgccgcggctacccaaaagaatgaggtagctgaatctgccgactcttcggctatcgcgaagagaagtttctgcctcatctcgccagttacagcgccctcgcctgccgctccctcacatgccacgccctcgccttccaagccctcgccctcgcctgctgtcacttcgcctgaaaatgtgacattgcccatccgagggcttcgaaatccctataactaactaactggttagttaattctagtctccaagaatgaagcttttcacccataaaaatgcagacatgtccatatttctaggtggtttccaagacagatgaagctattcagagatcacctaatctacaatagattgctaccatatgcttcatgtttgcttgctcgcttactgtttgcatgtctattagtttgcatcacatagattgtttgctagatagctaagcaaaacgttcgaggttaccaacttttgcaaagggtcagcgatatcaactggctgcttccaatttgcaacttgcctcttctttctttctccatcctagttattttgtattagatgcgctcctctctctttgcaagacctggcacataaaaggagtattgtaaatctaacacccccacagaatgaaaagcaatagtggctgtaaagaggagcaaccagattatcaagatcagtgagtcttgagaccgtgtgttctttgttctttactaggcagtatatcctaatcatgtaagcaatatactttaaaccatatagggtacatatggcaagatatgttctgtttttttgttacagagtgatcaggagaagcataacgcatcgtctgagcaggtaggtgaggtacatggtgaaaggcgagaatggtgattggatggagtatgaaaaaccaataagaatccgtctataatactgactttgatacttaaccaacaccgctcccttctgaagttctacttttggcaacttatttctctgttgtctccatgacgaattactgcctggcctgcttaaatctcctatctatcgtttatttcctcctatacaattctctgttgttgtttcatcgccgccaccctctttgacctcggggaatatcatatcttccaccagcagctctggctaacagaggaaacgggctcgtttcgattatattcggtggctcatacctctatatggtctccaatacgctcgagcgaggtttgatttccaatttaacataccgatctcttgctagtgttcagttatcggtactagttttacaatgcaggcgcttcataaccgccttgtgatcgacaatcggatccacgaacagcttttggagtctacatccttggccatttttgtcttcaaacgttaaggttttgatgatttgctcctcagcaacacagttattttccccagaagccaaaaggcaataatgcttttccgaacatatccagtttacacgccaatccgacgaacaatgcatcatatgtcagtgagggtggaagacaaagaatgcatgccaacctgaatacaagtgttattgtcgtaattctctatgaatcgcctattacaaccgttgtttctgaggaccttctgcccgagcataagatgctacccaaacatacgatcatcccaagaaatgataggcggcgactttaaggtgcttctgatggtagagttactccttattcagaattgtttctggatttgataattttctcccaggggttgcattcaaataccatgacatatctcctagtaccatggctttccatatctcgtatagcctcaatttatacgtttaaatccaaactcatattttttgacaaggacagtctaccaatcctctctgtccaaatgctggttatctttggtgactcttggctcttcgaggtggccttgtgataagtctattttcacacgtataaagccctcataggagatacagcacccaatcccaatggaaaacttatactttggacttttataaagtttagacaaaagatactcgtacttgaagcgatagctggaagatatccgcgtgagacagacttcgtcagttgctacaaacaggtttattgggaaggggagagacctccccagtcaaacagagaatgggcgcagtcaacgaggaaggtgctcagctcttcaaactccccgcgcgtaaaacatttctcttcctctcctcttctcttttcgcatctcatcccatccacctttcaaaacagccataaccatcacaatggaagaccctctttcccggggggaaaccccaaagaataagaaaaagcggaacccaagcttccgccgatatctacgagaccatggaattgatgtcgtaagtacttatatctactctggtctcaacccgtcgaggtcttctgcttgtcccatcatagctacgcatcgtatgatctgaattaacattttggttgaattagccttcgcttgtgcagggagtacgtgaccctgcgcttcccctaaagcgcaagcgtaatcatcgccgctataggcaaaagaaggcgaagaagataggtatgttttatggtatatatgatactgggtagacgctaatgatctaaagagacagaagctgccgcggctacccaaaagaatgaggtagctgaatctgccgactcttcggctatcgcgaagagaagtttctgcctcatctcgccagttacagcgccctcgcctgccgctccctcacatgccacgccctcgccttccaagccctcgccctcgcctgctgtcacttcgcctgaaaatgtgacattgcccatccgagggcttcgaaatccctataactaactaactggttagttaattctagtctccaagaatgaagcttttcacccataaaaatgcagacatgtccatatttctaggtggtttccaagacagatgaagctattcagagatcacctaatctacaatagattgctaccatatgcttcatgtttgcttgctcgcttactgtttgcatgtctattagtttgcatcacatagattgtttgctagatagctaagcaaaacgttcgaggttaccaacttttgcaaagggtcagcgatatcaactggctgcttccaatttgcaacttgcctcttctttctttctccatcctagttattttgtattagatgcgctcctctctctttgcaagacctggcacataaaaggagtattgtaaatctaacacccccacagaatgaaaagcaatagtggctgtaaagaggagcaaccagattatcaagatcagtgagtcttgagaccgtgtgttctttgttctttactaggcagtatatcctaatcatgtaagcaatatactttaaaccatatagggtacatatggcaagatatgttctgtttttttgttacagagtgatcaggagaagcataacgcatcgtctgagcaggtaggtgaggtacatggtgaaaggcgagaatggtgattggatggagtatgaaaaaccaataagaatccgttggttaagtatcaaagtcagtgtggtaggagtaaggacacccagtggcctagtcggtaagtctatcgagcagtaccgctctagactaccctctaggtcaactgcctggtttagaacactgtcgagaatttcgcactcacggctctgggttcaaaccacttgtccactttttttatcctttttcttctctctccctatattaggaccatatagaggtatgagccaccgaatataatcgaaacgagcccgtttcctctgttagccagagctgctggtggaagatatgatattccccgaggtcaaagagggtggcggcgatgaaacaacaacagagaattgtataggaggaaataaacgatagataggagatttaagcaggccaggcagtaattcgtcatggagacaacagagaaataagttgccaaaagtagaacttcagaagggagcggtgttggttaagtatcaaagtcagtattataggagtaaggacacccagtggcctagtcggtaagtctatcgagcagtactgctctagactaccctctaggtcaactgccaggtttagaacactgtcgagaattacgcactcacggctctgggttcaaaccgttcgtccacttttttaatcctttttttttttctctccctgtagtagtctctacggtataaaacaacaatatggtagtcttttaatagacactggcttggtattgctcttccccacggacaataaccatttattgatgtgacgcgctaacatttctattaagggggatagaagagaaccataacataaagctgtgatacgacgcgaaatggtttgtttagatagatccttgcctaagggatagctatataaacaggaagcttcccaattttcaacttgcttcttctttctcttcatctaagttattctgtattgtgtgcacacttctcttgcaagacctgccacgtcacactaatctgtatatacagactctcctaccgcggcatgctcgctctcgccctcaccctcgcgtactattttgccttcctttagatgcacggccgctaagtctccctcacctagtgcccgtgaccatgtgggccaaagaggaggctagcccatcttctcagagtatgcaagaggagacagaggctgatgattttgtgtgggatgccgtggaccctctgggtctccttgaataactggagaaactccctggattgatatcagcagggcttctcgattgggagatgggttgttgggggcctagaggggccatacctcattcttgacatttgtttgggatagagttatgaggctccatcggaaatctggtccgtgcgtacgaaggtgtatagtggccaacagtcggatgcctgattttaatggttttatcgcctaattgggactagctcttaccagttttagaccgcctttgacaccgctcaataccatcttttgtaagtacacatcgaagagacgaaactgttaccatggggtaattcaaatgccttctacctattttaattctcaaaactacattcaaatattcgccacgccggagccagaggatacggagagtttgaagtttatacggtcggtaggaatggggactttgtgttgaaatccaggcttggctttccaaccgttttgggccttggtgtcagttgcgctattagcttttctccgggaaagtgcgggactacggcgggtatgaatggctttaaatacaggagattcatatagttggagggccttaacgcctaggatcgatgagaaatagtattttggggggggggggggggggtatgcaaactttctttttccaatttttaaccnnnnnnnnnnnnnnnnnnnnnnnnnnnnnnnnnnnnnnnnnnnnnnnnnnnnnnnnnnnnnnnnnnnnnnnnnnnnnnnnnnnnnnnnnnnnnnnnnnnnnnnnnnnnnnnnnnnnnnnnnnnnnnnnnnnnnnnnnnnnnnnnnnnnnnnnnnnnnnnnnnnnnnnnnnnnnnnnnnnnnnnnnnnnnnnnnnnnnnnnnnnnnnnnnnnnnnnnnnnnnnnnnnnnnnnnnnnnnnnnnnnnnnnnnnnnnnnnnnnnnnnnnnnnnnnnnnnnnnnnnnnnnnnnnnnnnnnnnnnnnnnnnnnnnnnnnnnnnnnnnnnnnnnnnnnnnnnnnnnnnnnnnnnnnnnnnnnnnnnnnnnnnnnnnnnnnnnnnnnnnnnnnnnnnnnnnnnnnnnnnnnnnnnnnnnnnnnnnnnnnnnnnnnnnnnnnnnnnnnnnnnnnnnnnnnnnnnnnnnnnnnnnnnnnnnnnnnnnnnnnnnnnnnnnnnnnnnnnnnnnnnnnnnnnnnnnnnnnnnnnnnnnnnnnnnnnnnnnnnnnnnnnnnnnnnnnnnnnnnnnnnnnnnnnnnnnnnnnnnnnnnnnnnnnnnnnnnnnnnnnnnnnnnnnnnnnnnnnnnnnnnnnnnnnnnnnnnnnnnnnnnnnnnnnnnnnnnnnnnnnnnnnnnnnnnnnnnnnnnnnnnnnnagatgggggggggggggggggggggggggggggggggtatgaatagcttcatgtttcaactttcaagctgttctcaatttggtactaggagatctgtcatagtaattcaggtattttaatttcctgccggtctaaaattggtaagagctagtcctaattaggctataaaaccattaaaatcaggcatccggctgttggccgctatacaccttcgtacgtgcgtttttttgataaatgcaatttcaacgtcttcctttaccattttcattgagtttttggtctttacttaatcgtaattaaaaaagcagagctacgagctataggtagagactatggaagagatctatcaaatatcttgtttgaaagctcgagatattggcagtattcgttactatgaccgattatcacgtgattgagattggttaagtaccaaagtcagtgtatagtattcatgcgaaacccagtggcctagttggtaactcgaccatgagccatacctgctctagaaggaaatatggtaatcgtccataaaaacattgtaaaataatatgaagaagtctacgggggatagaaccttggtggtgcccttataataaatttatcaacgatcaagaaaaatagatctaatgctataatagcttctaatttaaccttatgtattctgttatgttctgagcaggccatatcttgcgcatgaaaagagcacgaagctcacccgctcatttcatgacgtgacagaagttttgatcttggtctttttctaatcatggtgtgatgaacttgaaaacatccatgaggctttgtaccgaccttgaagttcaccaaaacccactgaaaccccctggatatcagaactgggccaagtgagcaaaacttggacgagttcgaaagaccaggataagtaaaggaactcaaaccctcttgaagtattggagcattaaacccagatcctgtacgatgttatcagaccgtatccaagttgagatgtgatatgcccggaggtaactctagtcagtaagtgacagcgaagataattctgagcccaagtgtgcaagtggcgcatggagacatcctagctgtgtcatgacctgaagaccccagttttcagtatttcttccgccaccatcgtttcaaagggcctcgcttctagcccacgagagtgagagcttgttggcgaatctcgcagatgtatgggctcacaaagcgacggacgatgcgtgatagagtacagctctagaaaacatcaattagagtcactgtcttcgagaaatcaatgacacttatcatgtagtaattcttcgattcttctgatgataaaatggcagcatgtgttgtagaatattccaatattgcgtctcatcttacaatggagttggcctcgagaatgcccaactgatagtcagcatatgaggatccagcccggttctagatgaaacttggttgacgactgatgaatttagaagtggaataattgtgggagagaagagaaagagaaaaggcgcaaatggagacagcaagcatgagcaaacgagcgagactgggttttgtgcccactacgccgacattttttgtacgctctaatctttttctctttgtttacgacccaagaaaacagatttacacgcattgcaggaagttattgcaggcacaagcttcagggcaaactatcatattcatgttggccttatgttgacatggtcttcgtccaccgacttgacctcggtatagacgagagtgtgagctcagtcacaaccaataaatctcatggtatgttaattgattgaccatgagagcagaacacttccaagtctaagctgaaacccggtgttgcgggggttgaagtaaatcggggactatcgcgggaccgcggacttttgtccgcccaactccacttcttatcaatgaccatacaaagtactccagaccttccagctttcctttataaagcgatagtacgcatggcgcattctctgtttttacgaaatcccccaagaaagtatcttcaacttgtgaagcctctcattttgaaccctgctcgaacactttcttcatcacgtatacaagctatgttgacaacagagctctctgagactcaggtctctgcgctcagggctaacaaggagcgcctggccaatgatcttcatcattcgtgtcaatggggatctgggatcaggtggggagagtaagatacaaccatattttccaaggcgactggagaataaccgctaacaaaagcctcggcgacttgatagtggacctacagataccggcatgcagcgcctggcgatttcagaagatgacaagcacgtccgtgattggttcatccggactatgaaagatctcaagtgcaacgtcaccgtggacgagatgggtaatatctttgctgttcgtcctggtcggagagcggatgtacctgccacctttattgggagccatctcgatacacaaccgaccggtgggcggtacgatggtattctgggtgtgttgtcaggtatcgaagtcatcaagactatgaatgacatgggtctggaaacggaaggcggagtcggggttgtcgactggaccaagtaagatcccacgttcaacctggacaatgatcatcactgaccgtgtccagcgaggagggcgcccgattcccgatcagcatgatctcgagtggtgtatgggccgagtgcatcccattggcgcaagcgcataatctcaaagaagtcccaactgtggcatcgctgccaacagcggcatcagcaccagagactatgaagagcgccttgcagaagattggttacttgggtgatgtcccatgctcgtacaagtcgaccccgatggccgcccatttcgaagtgcacattgagcaaggcccatacttggtgtcggcaaaccagcgggtcggagttgtgacagctgtgcaggcctacaaatggttccgtctcaacgtcatcgggcgagatacacacacaggaaccactgcctttgaacatcgagcagacgctctctatgcattcgcccagatgatggtgcgcgcacgggaagtggcagcttcgaagggttgtctagccagtgtcggcattgtcgaagcgaagcccggcagtgtgaacacagttcctggagaggtgagctttagcttggatatccgtgggcctgagacagagctagttgccgaagtcgagaaggagctgcgcgctgatttcgacgctattgccgccgctgagggtgctggtattggtaaaccttgtcgcgttgagtggactctagacttcgactcacctgcaatcaagttccatgaagactgcattaagtgtgtggagcagtcagctcaggctgttgtcgcagatgcttctgttgcggatacaaagtcacttgtgcggaccattatgagtggtgctggccatgacagtgtcttcacttccaagcgtgtcccaacgagcatgatttttattccatgcaaggatggtcttagtcatcaccccgaggagttctctactgccgatgattgcgctactggagcatctgtcattttgcaggctgtagtgcgttatgaccggaagagattcttgtaaggcggatgctcactttaaccgaacagaaacgccttgtatatagttcagaacgtttaaatacgtcaggtatattaatgcatattacaccgagattagcttcgaaattatctactccgtcgttgctcaatcagtgtgacgtacatagagtgaatgcgttctccaggaatgcaatagatcgactagtcaagagagctcgaagacctacactaagttcactaatagaccattgtcactcatgtcataaatttagcaatgagtgactatgacaatctacatcaatccacatggatctacataatgaaaccagtggaaacatgaatttcttctttttattttgtttcctgtatccccaagtcccagtgaagctggaccgagatctaggtgcaccgagtgtaaggcccatttcgagaaacctctagtccggcagccgaattcgggtacaccatcaagactctagattgaccgagaagtggttgacaggacaccaatgcctctcagcatttactcctggggagcagcaccacggccacggccgaagccaccgcggaaagagggagcgaactcgccgggggcaccgccctcctttccaccctcctcgcgacggcggtaaccgccctcacggggagcacggggaccacgacgctcaccgcgctgctcctcaccgcccatcatgccgcgggggggagcgtgggaacgctgctgcttgatgtgggtggcggggacaacctcggcggggaggtggagccactcacggaggtagtccagaccctgttatttgattagtatttggacatgtgagcgtgttagatgtagacgagtcgtacctcgggggtgagggtgtagtagtagtactgccacgagaactgagtcttgacaaagccgcgggagtccagggactggagggccttgatgacatagaggttcttggtgtcaatgtcaccgtgcttgggaaggttgaagtccttcttggccacgagcactccctctataatttgggttagtgaatccgcacatgacgcgagcgcaatgtcgcagtgtcgcgggaacgtcgacgaaggttctcgttacataccacggaagaggtactcgtggatcttcttgcggtcgtccttggggataagcctgcgccattgttagtaaatgtgtcgggaataatcgtaagagcgaggatacgtacattgtcgcgagttcctgttgcaagtcggggaatcgctttgacaacgcccgaaaataatggttgatttaaatgatggatgaagagtggagcttcgctatgagaaaagtgcgtcggtccgaattgggtgtagggttatgaccctaatcagcttgtggttcaggtcacatgatacaaccttggaggtgatacaccatcacgtgagaggaaccataatcgctgactaagaatatgattagtcatcctggctgcggccatctcgatcttatcggaacatcgtccatcttctaatacaactatactttcttcctaccaaactcttcagttgcacgctcctactagtatatcgtgaactgtttctgacacacaatatggcttcctcaactgtcaacgttctgttgtcgtcctttccgggactgtcgctgccggcgacactttcgttcattttgccatcgacagcgagcacatcagacctggccgccaagatcgcttcatatctcccctcatcactctctcttcagtctctcgtccttactacaacaaataacaaacatctcacggccacctccgagtgtatccaatcttttctcccgacccgtgatggcgtctttacctccacactccttccgctacgcctgactgcccccatccgcggtggcaaaggtggtttcggctctcaactgcgtgctgccggtggccgcatgtccagcaagcgaaagcgcaatcaaggcgataacaatggctccagtcgcaatctcgatggccgccggttgcgcactgtcaacgaggcaaaggcactagcggaatatctcgctgtcaagccagaaatggacaagaaagagaaagaggagcgtcaacgccgatggcagtccgtagtggagatggccgaaaagcgtcaagacgagttgaagaacggcagcggcaggcagaagttggatggacagtggatggaagatagggaggaaatgagtgaaaagactcgggaagcagttctacgggctgtcaaggatggccaatggacggataatcttcgcgacgcactcctgggtggatccagcaccagcgccagctccgagggcagtgaggaggatgcctcgtccagcgaggacgaagagagcgaggaaaatggagaatcatccaattctgttgctaggccgtctatgcctcaaaaggccgcaccaaggaagttcattggtttcgatgaggatgacgagttcatgagtgactccgatgacgagatggaggaatccggcaagggaaagggaaaggcgcgcgcttgatcttctagcaaaccaatatttgtccatgtttcacgacagcgttcttttactgctactttcagggattctccagcgcatctgtgtttcagcgccttctgtgccaataatttcagtctccgataggagttttcaatccaaattcatttactgccaccaattttagtctcactttagtatactaatccgtaaaatgacttgttgcgcgttgttgtacggcggcccgaatttaccatgtgcgctatcgatagataactgtctccaaagaaaaaagctccgcagctactccgcagtttcgcacgccatcatgtcactctgctctcgaggcgcagtgttcagaaacccgagattcagtctgctgcgtctgctcccaaagagcattcctcgatctcaggctcaaattcccttctcaaaatcgcgcgccgcgccacaatccaaaggccttgcggacctccgcaggcaatgccgatgcttttcaacaactcgccttcaacgagaacagcccctggctgagcctcaagctggcactctagccgattccctgccgttgtgctgcccaggatgtggcgcattctcccaaacagttgaggcaaacgagccaggatactatggtacatctcgaaagcagattcggaagctactcgccgtgagaaaggaagcaattgaatacagaaataaacaacaaaatgaggttatatccaccgagggaggtagcttaagcgcacagcagagcgatgccatcgaggatgcagtgccacccaagcctattcaaggtaggacatctagacaattgcgtaaggttgctattttgctgactgaagaaaaagatggagcttttccggatgaagctgtcgatcccgagaataaatttcttgggtctccgggtcgaatcaccgaagtctgtgatcgttgccacgacttgatacaccacaacaaggcagtctcttcgcccaagccgactattttgtctatacgaaactacctcgaagaatcaccgtatcgacacaaccgtgtctaccatatcatcgatgctgcagatttcccaatgtctctcgttccacggattcattgggctttaatgctgcaggagcaacgttcgcggaaccgacgatctacgaacgagaaatttgaacgcggaagaagacttccatcactctcgtttataattacgcgctcggatcttttggcggcaacgaaagagcaggtagactcgaagatggattatattcgcacagagctccgcgcagctttgggaagatcggggaaggaggcccgtttaggcaacgtgcacatgattagcgcgcatcgtgggtggtggactaaggaggtcaaggaagagattcgagagcatggtggcggcatttgggtcgttggtaaggcaaacgtgggaaagagcagcttcatcgaagcgtgtttccccaaggattctaggaatgtggagaaaattgaagagtgggttcaacgccgtgaggaaaatgagattcccaccttccttaaccccgacagccttctgccccccgccccccgcgaggatctctatcctgtgctcccagtcgtgtcttctcttccaggcactacagtctcgcctatccgcattccattcggtcgtggaaagggcgaggtcatcgatttgcccggcctagagcgtggtctgttggaggacttcgttcaggatgaatacaaacgtgatttgatcatgacgaagcggatcaagcctgaacgttcgaccattaaacccggccagtctcttttgcttggtggtggtcttatccgcattaccgctgtgaaccctcaagatactgtcatgtcggccagtttcctgcctctcgagtctcatatcaccaacacacagaaagcaattgatacgcaggccgaagaaatcccctaccgagggactgtcattatgaaagaaggaaccggcagcacaattgcctcggccggtatattcgacttgaagtgggataccaccacctcgaatcttcccacctcgctagccaaagctgtaaaggacagggggatccctgtgccttcattgccgtatcgtgtgatgtcggcagatattctcatcgagggctgcggctggatcgagctcagtatacaaatccgcagcaagcgggacactgaagacgaaccttcctatccgcaggtcgaggttttcactcccaacgggaaacatattgggtgccgacgtccgattgaatgttggaacttcattgcagagaagaagaaaatcgacaagcgcaaacagccgcggacgagatattgatttttgttgtgatttgggtatattatatggacgtgtacattaggccatttagcatagcgggtcggcgtttctcctctccgtccttaaagtggtcagctatatcaattggctgcttccactttgcaacttgcttcttctttctttctccatcttacactccttcttccatcaagatcgctctggcgccttacaagatggaaaacattttcgatcttgtttttcttctagacacagacattccatttctgaaatcaggtaaattgcactccagaatcctcatatcactttgctcgttgtcctaacttcgaatatcgcttctagattcctgtcacaatgatcgaaaagggttatcggtaaaaaggccgcaaggtctaatctcccccctctcccaataggggctcagttatcgacaaatgcctgccaagtttcagatcaagatcacttatgcatttgagaccaatgcgtcagccggcatatttgtccgaatgacaacccaaggccgaagtttaggctagagcattatctacatactggggatgtaggggatgttgttgagtcttatatccgggcggggagatacagaccgcatgaatggttcatgcttgaagaccttggggatgaccaagaacgttctaagttgacaaatatcaattatcacatggaactaaccagttaacgattcatagcccgcagaatggttctttccaaaggtcctcattttgtacgtagggctcgtaggtgggggatcaacctttcgccttccgacaacatacgacgactcgcttatttattctgacaagattcttttataattgctagatttgttcctgtgcaattaactcgtctcaatatatatatcactccctaacgttcagcaaatcagcattcacgctcgtctatcccatgatgttatcttttcggggaagcgaaaatgccagggaactggccaagccctggcgctttagtctaactcagacctatgacccaatggagaacccgacagggctcatctcatttggcctggcggagaatgtatctacaacatatatcctcacggccggaaaccaagagctaacttccaaccagagaccaatgagagcggagatagccagatatatcaaccaaaatgtgcgtattccaattttcacttcatgcccacatagtgtccactgactgaaagaatcccgctaaatcacataggtcgtttttacacaagattctatcagctaccgcccaagcgcaccgacagctgcaagattaccagctgctgctgcagttcacctgaacaatatcctcaaaccacatgccccaattgatcccgagtacatattagtggcagactgtccgacctctcttggcagcatgctaggacacagtctcgcagaatccggggatgggatcctcgtcagcagacctatatatggccgctttgagctcgactacggcgttgaatctggcgttaaaatggtttatgctgatacaactgtggaagaggcattctctcctgcttgtgtggaaaaatatgaactggcttttaaggaatcctccaagaacattcgagctgttctgctcgtcaatccacataaccctgtcggtgagttatacatgccgcttggtccgttgattgaactgatttggtacggccaggtcgttgttacccagtcgagacactcaaggctatcacccgattctgtaataagcataacctccatctcatcagtgatgaggtatacgcttcatgcgtgtttaattctggtgaccctgaggctgtgccgtttacgtcaatcctctcgctggatcttgcgggattgatagatcctaacctggtccatgtgttatatggtttcagcaaggtaggcatcggaaaatctcaatagaggcaaccaatttgacatgatataattataggacttcgcttctggaggcctccaccttgggttcttggtgaccaaaaatcggcagcttcggcaagcctgcagaacaatcctgtgagatctcgaccgagcaccacgaaaactaaaaaacgtcaaagattaactctatataggagactgcacggcgcttcacaagcagcggtgactatcggcaccgtgattctagaagaccaagctttcgtggcaagcttcacagccaaagcaagacagagcctcgcttcagcctaccggtttacaacctcagtgctcaacagggagggaatcaactatgtcaagggcgggtgagtataccaaactcggagaagacattattcaaatcctcatctaatccggttatcagaaacgctggcttcttcgtctacatcgacctgtcaccatatctgccccgtgacgattatcttaccccgcgaaaccgggagttttctcttgctgagaggctcgtcgatgccggtgtcttcttacatcccggggaagagcattcgagggatattgggtggttccgcctggtgttctcacaggaagaggagatattgcaggaaggctttaacaggtgagtcatttgctgattatttctatgtattggttcggcccgttgattgatggtttgttttgtgatttatagattgttgagtgttttaaggtcaagtaaatgaaatattctcgatgtcaccatcaagacttgaagatacggggaaagtatggcataaaaacgaaggacaatgcaatcagaggtagtgaatgcttagatgcaaaggaatagaactgaaatattgaaaatgctatatgctatatgttttatttgattttggcagaagtcatcaagcatgattttttgaaactggaaaatgagattgtatttttcaaagcaatgtcgtttattcgacgttgacaaattggaatgtaggagttcctggcacggcattctcaccggccaagccctcacgcttctcaccagtaccaacaacctcaccagtcttgccaccctcatcaacagcaatgatctcaatctccttgaaaccagaggtgcgcttcagaccacccaccatctcggaaagaacgacgaactcatcgaagggaagcttgcgatcgaagacagtggcaggggactcgccagcgttgaccagacggcgcttcaggttctgaacaaagggcatggccttcttcatctcaccgaacttgccaacctttgcgctgagctccttgtcgttgaaggagaggttcagcgcgtcgaaagaatcgcggaccaggtcaatgtacttctcctgccagttggggaacttcttggcaacgaagatgataagcttcttgggcttgcgggggtcgaaggcaatgttcttgcccttggagagcttcttggtgaagttaccctcggagctcatgatgttgcttgcggtaccacggacgtagttctgagcggcggtcagctcgggagagggctctggcacagaagggaactgggcgaagtgaatagactcgggctaaaaggtgttagatcaaggttgagcataaagtggggtaaggaaactgaccttattgaggacctcgagccagatgtgctcagcccagtgaggagtaatgggtgccagcatcagagcctgcagctcaatgtagcgcataatggtatcacggtgcatacccacgccagcagcagtggaagcctcacggtagctgtcacgggagctagtgaagtcatatagaccggacttgagagcaagcttgaaatcggtgctagattaaagggttagttattgatgtcaatgaattaatggaatgcgaagcaagagtgcaaagcagtgaagtccacttactcctggtagtgcttttgggtctcgcgaaccaggctgttaagttcgttattgaaaagcttgtcagcgaaagcatcagcaggtccagtgcgcagagtctcgtccttagcaatctcctcgatccactccttcaaggtgtggagacgcaggatgttgctgttggcaacagactcctcaaagttggcatcttcaatgctgtcaccagcatcggcaaatgcaatacgggtagcatcggcaccgaacttgtcaacggcatccttgagagtcaggaagttaccggtactcttactcattttctcgccgttgaggagcaagtggccgttagcacggacaccacgaggccagtattccttggggaagagagcaatgtggatgtagaggaagaaggtcaagtggttctggatcaggtcctttccggagacacggacatccagagggtaccagtattcgaattcacggcgcattttctgcagagattccttgctgattccactcttagagatgagttcgtcgctaatttcccttcttgtgaaaacgtagtcccagacctcatcggtcatctgttcggcggtcacgttcagggagccggtcgtcttgccgtaccggtcaccgtgaaggaggtgggcgatggtgtagtaggccatatagacggtactgtcactcagactctcaactaggaactgcttgtcccatggcagcctggacccaagaccataggttctggcacatgcccagcggttcagccaggaaagattcttctcgaacccgtttttgcattcggcggagtaggtgttgaggttgttgacaacgtagttcagggtctcctgctgccactcggcatcattctcaccgtagttcaggaaccactggcccaggtaggcaacaacacagtcgtcaccactacggctgacaaccttgcccattgggtcggcgaaagggaaggcatcaccactgtcgtagaggtccttgcggaccttgtccttagcctcactgacaggctcgcccttatatttaccaactagcatagtacccttgtagaaaccttccatgtaggccaagtccttggcctgagcaagctgggtgacgtccttgggagagttgatcttcagctccttgaccagagcaggagcagtcaagctgccgtaggtgggagtgtcaatgagcgggaatatttccagctcagcccactccttctggatgccgtaatactcagccttcttcgccaaatccaccagggtggcgtaatcgtcagggctgtcggagggaacagaggtaacaacaccagtacccttggctgccgaaacactttccatgggcaggatgcgaataccctcggtgtggaaagacagaggtgcattgaccagtgttccgacgaaggcggaacccggcacctcgagaaccagcgggagctcatcttgggtcttggggaacttatcgccgaagaaatgaccctggaaggccatgttccaagcagctcgcttggtaacaacaatgtattccttctccttgagcttgaaaagaccgtagttgatcttgggaccgacgaagcagctagtctgaccgtacatggtctccggacgcagggtagcaggaacgaagtataccttcgcgtcatcctcgatctttcctttcacgagctctgcaattttaggcgaccactccttggcctggagcttgatcgcggagtattcctgaggaccgatgccctcaccctcagtgcggtcgtggtccatgcaaggctgaccgtccttaggcgagtagatggtgtaacggttgccgtacatgatcttaccgagctcgtgcaggcggttcatctgccaacgtacgaaagcatcgtagtaggggttagcatcggtggtgacgaactgtcggcgccaatcgatgcgggcaccgatactgtcgagatcacggatggcaagaggagggaagtgttcgagccagtgggcagcgtcggcaaacttgtgaatttcctctagaggaacgccaattgccagcatgatctggaactgatacttcatcttcacggtcttggcagcggccttgctcttcttgccagagaacttctcacctgcctcagtcttaacttcttgtgtgggggctgcgaggaggtcctcggcggcctctgcctcctcattgtatccttcgaaaccctggccgaacttcttcacctcgttggcaagcttatcggcacaagccttgataggcataccggtgcagtggaagcccagagggaaaagggctcgcttgccctccatgcgggcaaatccagccatgaactcgaccttactagcagtaaagctgtgtccggcgtgcagagtaccgttcatgtaagggtaggccatggtaccgaagaacttggggtacttctcacggagctcggcgggggtcatggcaccctggggggattcctcgaatgagggcgcatcgacttcgaaaatcttgttctccttccattgtgcttggtacttcttttcgattgcgactagggtgtctcgcttttcggtctggcaggcgagatgatagttagtaaataaaaatcggggatggtggggagggaggggtatagccacattttccaatttgagggtgttctttgagctgttgctcggatcgagctcagctgcggatgcaactgcggcggccatttttcctgattgtcagaattggcctataattcccttggagagcggaggggagcaaaagaagcgcgaggcgagatataaaactgtttgctcggtttgttcagtttgtgagtcagtgtaatacgagtgtactgtattttacggcggattccacactccagatgtcgtttagaatgctgcattggtgtgtaaaagaggtgataagtaagagatctgaggtaatatatgtatataaatctagtcaaaagatgaattctcattctccttttgtctctaaagtgagtttcaactaaacgtcttctatgtgaccggatcaataccatctatagattggaggtgcacgtgactatcacggagcaacttcttcgccgacaagcgcatctgcgataaatttccccgatcaacaaactcgcaattccggacctatattacctgttattgagcaattatcttgccaattagtcttctacttttgccttatccctatacccgcacgtctcatcgcataagggccagtccctgtgcggaacagccttcatcatggtcaacttgttcaagcggcttcgtaggctgcaaactgtatgtatagcttctctcagctctccctacccgagcttctcaatgtaacgcagaattgatatactaatgtaaaattgtttctgtcaacagagagtaagcccgaaaccccgttcttcgagatctccgaccctgcaacctccgaggccgaactcgtgtctcccacagtctggccgatatgcaatcaatcaactgactcgttctttcactgttgcagatgctcgaaaccaaagttggcacaggtgcagccatctttcccagcctcacctccgcatcaaaagaattcccagccgtcacccgactccacctcacatatgcacgcaagatcgaccagggccacggaggcgcgcggcatttctggcgtaactgtcttccgcgactgaaatatcacaacccaggcgtgccgatgactgtggcacaaacctccaaccagcaaggacccgcagcattgacaatttacttcgccgaacgggtcggcagcgccgcagcggctctcgcaaacgaaagaaaggtcgtcgatgagcttgctccgacccccgaggccaatgagcaatcagctgttctggatatcaagaaccgcacgtaccaacaaatctgggatcgtgtccaggccatgacgggcgcgaaggtagtccccgccaccagcgaagacatcgcgctggcacagaagttggcggagatcaaaaagaaatcgggcccggatcgcgaacgtgtccaggctattcggcaggcgaagaaggatcaggagcgcatgctcgctgaggctagaggccaggtggataagcaagtgtaagatagtgcagttttgttctagtgttgtctttggattcggttgatccatccaactggtttcttcgtcttgagaaatcggctgtctgtagcatagcatctttttcccgttacgactatgtactatttcttggaatatctttttaatgcgcatgtcgcattcccttgttactcaaattgcgtgaacactgaagtagatggaggcgcataggcatcaaatagcaatagcaataattgtagattcaacatctcgcaatatcaacgctaaagtatgaaagacggcctaaaacagatgagaaagacatcaccccatgcaaaactatgaaatgtccgaacaacgacttacagaagagaatgcattcgcgagaagtgttacatgacctagaacattgttagcaagaagaatcattacctggtaccaagtcaaatacatacttcagcgattgactgccgctcaatgattgatttctgtctctcgttgcgcgaaacacggtagtaatagtcggtaaagtcaccacatttcatgtggcgcaggaattcttcatcgtgcgtgatgacaatcaactggaaattagcctgctgttgacgagtgcggataatgtcatgcagcgactccgccagagagcgaatattatctcggtccaggttcgtagtgggctcatcaagagcgatgagaccgcaattgacaccgaaacattccgcaagggcgagacgaatgatgatactagccaggaccttttggcctgcactgcatcgacctcgcatgtccatctcggcgcctgacttgaccatacagacgcggtagttgtatgatcgattgcccttggcgttctcgttatcagaccggatgaggattgtgtcgacatctgttccgcgatatgttttctgccacagttcgccagcgatagcgttgatttccgccatcttcaggccgtggtattgcatgattgctttgtcaagagcgccaccgtatcgagccaggtcttccacggcggctttggtggtctccactttgatgtgggattccttgtattttgaggatgcatccttataatctgtgttccagtccgctagcagctgcatcaactgatcgtccttggacttcatttcgcccatcttgctcgcctgtttggcagcaagggcattgtgttcacgagtccagcgttctgactcttgcttgaaacggcctcggtccacttcagcattttgcgcttccaagtgctcaacttcttcagcaactgtgttgagagatcgagtggcttggcgatatgtcaagttgtcagagtattgccgcttggtgttttcgctgtccttgagttgggtcgagattttgttaatcgcccttgtgatctcgctttgatcggcttcgagtttgccaatttcagcttcgatttcttgaagctcctgcttgcatcgttcaagttggcccagacctccccgttgattgtacgagttgatgtcatcattggcaaggtcaagctgattgatgttctcagataagcggctgatctcgtgctgcaggtctcgttcacgctcgtcagctcgctggctgatatcatcgtaacgggcttgggcttgaagcaattctggcgtgagactttcgatatctcgatctgccttctcaattgcgtcccgctgctgattattgagtttcttgaattctttaatccggacgatcaggtccgctttcttttccagctggaatttggcattgtctaggttgctcttcacatctctgaattctagctcgagcttgttgatctctgaccgtgtcttttctttctcatttgtcacttttgtaagagtctttttcaactctcgtgacttttcattgatgaaagcaatttcctcctgaatgtcttccagggtacgggcagttgaagggtcttgctgctttgcagaaagctcttgaatttgtgatttgatcgtcttgatctccacatcgtaacgcgcgatagtgctcactgtcttagcaagcccctcgacatcacgcttgctttctgttttctcgctgacctttccgtcgtgggtttctagcttctctagaagttggtcacgctgggattcggattcttgctcctcttgttgaagctccgggatgacggtctctgacaagcggacccaggtgtcgtatgatgcactagcagcgcgagcagtttcgagatcttcttcaaggctcttcagggtctcatcttcggcatcaaggccagccttcttgactagggcatccaacttctttgtgaaggtctggagttctgcatcgttcttgaacgatctttgacatgttcggcacagcttggtgcgcttagcagcatcaagacattttgtaagatactctcccattccggcatattgatcagcgtctttgcgagcgagatcatactgtgcctggcgctccttcacaatttcagggtattcggaaggctctgcgtcgactgcttcgtggatttccttcacgcattcatcaagttccttttgacgctgcttgaggttcctcttggcagtcttgagcttgaactctacatgctccaattctcggctcacgccgtcgcgctgtcgctctgcatcggccacctgctttgattcgctatcgagagcttgttggaagcctcgctctaatgtgtccggcttccagtcgggaccaacgaccttctcgaggcgatcgctatgagctcctctcatcgtctgtaggctgcgttcgcggtccttcaattctttcttgaggtggtctaagcgagccaagtccccagccttcttggttgattcaatgagctcggtattcaatctcgagctttcatcctcaagacgccgaatttccgcattggtatcctggatatcttgatcccaggaagcagttttggctcgctctttcgcgtgctcaaggttcgaagtgatatcctccacctttgactcaagcgcagcctgtaggccctcatcaacctcgatttcattgagctttttttgatgggttgttgcctccttgtcattcgcagcaatctgtcgttttgccgcgtgcttggtctcttgaagggcggacttggtttgcccaatctcattcaatttttcttgaacctcgcggagctctttctgggcttcacgcctcacacgatccagagattggttctggtcttttaagaggcgtttgatcttctgcatgaaggtgtcaatttcagactgatccatcttctcgccaataccacggatgttgttggcacgagcaatctcattaatcatgttctgacgcctttgagactgacgctcaaagttggccttgtcgttctcaaactttccattctcagcttgtttcagcccaaggcggtgccgagtctgctcaatctgctccttaatttccatatagctttccttttgtgactcttcttgttgctggtattggacctgcttcacttcgaattgctccagggtagattcaagccattcatcggactcatcaagctcaactagatgtctcttgaggttatcaatggtggtttggatacttttagcttcgatgcgcttgccctcaagagcaccgagcacctgggcataactttctgattgcgtccaagccttatcggcaagctccgcgacgcgccgcatctcttgtgacatccgctgggtctcttcgcgcaaggcctcgatttcctcttgaagcttgatggatcgtttttcagcacggtctgctttgtctttgtcttctttcgcatgttgctccataatcttatatttgccaagctcctcgttctgcttcttccgcagtgctttgatgttgtcaatagccttggtgtacttcatagcctcaaatatttcgtcaaacctctttttcaacacagacggttcactcattggccacagactttcgtcctggtggcagaaaatgaccgaatccagtacggccttggagacgcccagatactgcggcatgatttggtccagctcagccactcgcgatgaaatagctgtgcgctcgccgtttttgaccataagcagctggccttctagggtcttctgctgtcgtgtggttttcttgaccgtaagctgtagactgcgcgtggcaaccattttcgctccggaagtggccttgaatgacagcttcacctgggccagtacctctttttcgccacatagtttcgggtcgtggatgaaagcaccgcctttgctgttcggaggaagatcgcccgttgtggcatatttgagacactcgatgatagtctagatccacgtcagttccctgctggtcgcaactctagtcgtccatttcgccatttcgtactgtttttcctgagccattgtaaccgacaatcaatgtgagaggtgtgtggaattggatcgtttcgctgcgcgtattatcgaaggagcggactctagaacaagcgtggttttatgagcatgagtgtaattactctccgcagtggccgcactcggatcaaaagctttgagagacgtaccccaggatagagagcttatcaatcttcgctacagtatgttagatgaccgtttgttccttttttttcctcgccgagctatagttgttgcacttacacctaaacctcagttagcatcgcgacacgagacgggaatgatcggcacgtacatttcgaacaaaagctatgagaggggcgtgtgagcccgttggcctttagctttatcgaatacaatcgaataaaaagccaaacacagagagagctgagaaacgaaagtgctcggatcgccgttgaatgtgattgatcacatagtcccgcgtcgaggcgacacgaaatcacgtggattgcactaaagtgctgcgggcccacagggatcggcggctctttgtcaaccagcaatggccggctcttatttccagagttctgtcttttcgaggagatccagaccatcagtgagacgatgtgcatattctgagaggcgcatcgtcccaccccctcttgtctgaatgaaccgaacgtactgtctcgaatctggagaatgaaccgttccattttcaacgctcactctactatatccgtcccctcgtgcggtcatagttttttgagggaaatctcgtggctcttcatgagacgtcggatccagacgcactcgaacctattactagtgccattatatctcccttttaatctctctacactgcgctcgacatggctctgagtcgcccacaaccctatgagggtatgcctctacccaactaccagatgagatcgggctccaacgaggggcatccggggtacacaatggagcagcagcacgtccatgcatcctacggtgggctctatggggtgcaaggtgctcatcacgggggataccagggtgtacaaaacgacgggggctggacagaacgagttctcgatgaaatgaaggacctgctacttctcctcacaccccacggccaaatcacctatgcctcaccatcgtgcaagagtatcaccggccgtgtcgcaaaacaactcgagggaagtgctctggcacattacattcatcaggacgaccagccaatcttccagcgagatttggacgaatcggtggttgcgaaccaatcgttccggacccatttacgattccacaagaccaacggcacatattgtctcatggaggcctatggacacccacatcttgcaaaccaggatgagcgtgcagggagacccacgccggccaacgggcgctgcaccggatttttcctcgtgtgccgaccatatcccagcaaggtctctcaattgctcgactcttttttggaacacaagattgagaacgcacgtctagtccaacagattgccaaattgaagcaagaagaagatgaagaggcgaccgcgactcgagtgccctattctaggagcgaccaggatattcgtgcccccgtggccgaaaaccgattccaacgattcgctcattcgggggaaatttctagtgaccctgatactacagacaccgtagggccgaactcggatgaatccgacacgagccaatcgacgggctatttcgcagagcccaatacccgcgaagtttactcacatattgacggcatcgaagtcatgaccggtcttaactacgcagacggcgagagatcgcacggtctcagtacaggtgttaaccgtggccgtcttatacattgcgatattgacatcaccactgctgctgaccaagagcgcaacgctcaggaaggcgaccgccgtaaaaggctcaaggcccagcatgtctgtagcgactgtggaacagcagactcgccagaatggagaaaggggcccaacgggcctaagaccttgtgcaatgcttgtggctgtaagtattgtcccgtctgttgtgacccccgctcagcttgcttgtaacctgtctactcttggcacggaacgagctaacccaattgtctttctagtgcgctggtctaagaaggagaagaaacgccaagagtcggcctaattttcagttctcggtttatttgcttttcttgggctggtggcctgccaacccctcagttgtccgggtgctttgactggtcaggcatgctgtccatttcgatgaatctacaatgatcttcagacgagccccatgctcgctatcgcatgggtgatgatcttatgtcctgtgaaatggatctctttggtccgatgtatatagctggccgtgatttcttttgcaaacattgtgtactactgcactatggaacctatgtttttttcttggtaattcaaaatttcattatgaggaattaaatgatttgacaaagtcggagcaaatcaacagtccaacgcccaggataatgacggcatggagtatgtactgagtaggcacttgtggccaaagacaagcccacggagagggccaaaggaatgaacagaaccccatatgaacgccatctttgggccgttaaataatgaaggtgatgtatgggcaacaagacgtggtatcataaaacgcaagtggtatcataaaacgcaatttctcgacaaacaacaattcaacgagggcatttaggccctagcagccttctttggcggcggcgggaagtacatcggcgaccctgccgaactctccggactgacttcatacgattgcggcgacgggtattgaggctgaggcatacgggagttgtcccgcagtgggaggtccgatgcggtactaccattgccaagtcggttgaaggccagcgttcggggtgcgaagggcgagatatttcctccaacagccatgggcggaaccccgggggtacggggaaccatacctgatcgcggcattgggccgggggtcataggaatcatgctgggagacttgatgatctcttcttcgaactccttctcgatgcgacgctcttccctctgctccaggatcgcatcccgttcttcgggggtgatgaagcaggaatggatacagaagccgaggataattacatagtagacactgaaggggatgttagctaactgtttcctcgtagaaggggagtaaacaaatattagagtggaaagggccgaactaacaccatgataacggtcacagcaaacagtgctttcgcttgcatgcagtatccaatgttggactttttgtaggcgacactgcaacttttcgcaatgtaccacggggcccctggctgaggatgtctggggtctgacatgtcagacccagcctgatacaccgctgacacgatatagagagcgaccaaggacacgtggacggcgaccgcaacaggaggataaaacaggttcatccagtgggtaggcaatttcgtgatgaggaagaaagtgcttaaaacagcaaggacaagattgtaactggtgatactgtttttaagtcagcggccacctcttgcatattgagtatgagtataatgagtaacttacaagctggaccaaaccatgggggccttgaatggtgtgtagttcgctgcagcatacaatgcctcgttgggagcactgttgaatccattgtctgctccatcttgccataataatgtctggtatagattatgggaagcgataccagtcaatgtcagcattacgatggtgatcggaaactccccagtcatcaaccaaagcacgagcttgtggtgcttatgcttctttggaaacaagaactgcattttggcgttgggtttggaaggttcgcaataaaaatcgactatattttcccaagctgaccgttcaaccgaagcgcttatggaagagttaaagctgtgtacaatatcagaccggccggctaagaccttctgtctgtcgcacgaaaagggctaaatgtttcaacgtggtagaggggtcagaaaagaaattagaagaacacaagtctgggcaatccggagggcgagcgttagatatgagctcgaggccaacaagtggccgaagacacaatccatcgcatgcaggaggggcacgaatcagcatgggaagagcccatgcgaagagattgatgtgtgtttgagaggtgcatctggccaatgcttgatggcggcaaagcgccagcgtaagtagcaacccggtcatcacaccaatgagacgacgaggatcgagggaaaccgccggtcgtcacacgctagcaggtgtgataggatggcagacctgcatgaagccctcaatcacatacttcccctcaataggatcagcgcacccttggcactttgagggaacttgcagccttccagtacgaagcgcccggcgaaccgctgctgggttgatgtgtcgcatttgtgactatgtagttgaccgtgcatatatacccatgctagccccggcgtcaggaaaatgggaacaaagaagatggcctctcattttcgaccatagccatcattaattcctaagttatcgagttctaaccttgaagttggaagtggtagttgtcgagtggcataaggaagtcatgtggtcggcagaatcccaacctgcgatctcaaatgcattacgatcatgccatcttttagggattccatcaactaaatccaagtccagctttgtagcatgatccatctcttgatatatcttgatgaagtcgttccagttgcgtccgcttgctcttcgctcagccattccaccccgcatcatccggcctagtcaacttgaattccccatttcaagaatcgcacgccaaatgagttcccagagagaggactcgattcctcatgagctgcgcacggctgcagagccccggcaaaatagactgcacccagtgcgattatcacacgtcgagcaggtcaacccctctgttcggctcctacagttcactctgactccccaagagaataatgtatggatttattttattttctcgtccgctgcctctttatatatgtccctatacccagtatcttctactcatacatcaagcccggctgccactcatggctggttgttgtccccacgccgttggatcccatatgccccgcacagtcggtggttccaatcacatatgagcatctgctatcatgcaccttcacccaatagatgtcgctgatgcattctacaggataacggtcaacagccattcagcttcctccctggccaatggcttgatgtccatattccctccaacacccaagccgggggcttcactatcacctccaccccggcagatgcggaggtgctgccgtcgccagaggcttctatagactcattagctggcgaagcgctagaaccatcctcagaatctcaagggcgaccaccatatgtagagttggctgtacaagactcgccgaataacccatccgccgcatggctgtggagaccaaaagaagagattctcggcaaggagctgagcatccgagttggcggaagcttcacctggcctcccactggagtcgatgttaatgatgttaagaatgtggtcttcgttgctggtggtgttggcatcaagtaagtgatacttccaagatatcatgtccgcgatgtatacaatcgtcatcacaaaccaagactatacttgtttcaatccctcatgagcaaattctaacacagtcttagtcctctgatatccatgctctcccacctaaacaacaacgaaccccacacccccaacccaacaaccatccacatcctatactccagccgcctaccgcaaatccagggaacagcctcggcagactcaatactaggccagatcctgtttctcccacgtctgcgccagatagtccgatctcaagaaagttcgcaccggctgcggatctcgctggaccttttccttacggacttggtctcgtcgcctgatctcctctcatctgggtctccctctgatctcaagatccaccgagagaggatatctgatcgtgatctgcgctctgcggctgtgggtattgacggtgaggtggatcctcggagcacagtgtgctatgtatgtggaccgcctgctatgactgattccattgtggagaagttggttgggattctaggggatggtggggagcagcgagttttctttgagaaatggtggtgagaatgggacgagattagtaacgacgtgatatattcgtatgcgattaattgcagtttgttagtcgatgaatgaatagtcaacgttacagttcaggctacaataagaacacaataggactaggagaaatggcttcaatatttttaaaaagataagctcccccgcagatgccgacctgacgcaggcaaggggcggaacgatatatgtacaggaaaataaaagaagggccgccggcaagaacggaacgacagtatgtgagagcaggggcagtacagacacgctggcatctcaatacaatatggggacgagaaatggaaaagagaatagagagagagatagagcagtcaggcttggttaggatgctggctctgggcccttgacggcaccgccatcgacgatcatcatttcgtcgattttggcttcggtttcaccccattctagacgcttgtatgtggatacgcgaccggggcctctgtcgaagtcgaagaaacgcactcgtcgaacgaagtcatcgtagccaccatagccgcccattccgacaccgccgccatagcacatccagagagatggcttcgcattgtcgtcttgctcgagcatgcaatagtcattgacatgatcactagagaacggttagtctttaaaacagcacaaaaggaaccttggaatggatgacttactgtccacaactaacaaacaaaacaccctcttcttcgagggcgttcttgaagccagagttgaatcctggtgcagtaggaggttccatccatgtacccttgaagtactttcctgacgtacgatactcagggagcgggatgtgaataaatgccacgttcatgtggatatggttatattcctggtgtttggatcttagactttgggcggtgtttttgaaccaccgagtttggctcggtttgatccaatcgtagccgcggaactgacgctcgtcgggggagtaagaatgcgtgtcaaggaaatagagggtcagggcagagtgtgtgcttgagccccagtcgaggacttcgacaacgtagtttccgaccccgtcaatgtcttcggggccggcggctgaaagagagtaaggtaggtcctcgtatatggtcatgagttgttctcggttgaggtcaccctcgtcgtcgtggtttccaaagatagctgcgtaaggaatcttgcggtcgaccagaagctttacagacttatagagagcactttgtgcatctggagcggtctctccgttgatctggtcaccagagaagactaccatgtccggcttctcttcgtcaaggagtcgttcgacaaattccaaggttcgggggtcggcttcacacttctggccagccaccgcttccgcgggaacagggtcacgacagtggccgagaccggtgctcatgtggagatctgccaactgcatcaccttgaatttcccattgtcgttgattctgggaacaggcttcttgggttttgcctgcggatgccctcttcggatactaagacgagtctctaactcttccgtcttactatccaggaggataggagtatctttgacttcccagttgggacgaggatcgacagcatccgctccataaaggacatcgacgtacgtcacggcgttttcggagtcgctagcatggcgggaggacgagcgcttgagccagatgcctcccggtcggggttcccacgattcgacttcggtctttgcaacaaattcagacgggggagtgatacggctaattttcaagtcgatgaccaccttgtcatcagggcccaattcctcctcctttttccgcttgaattgaacgtaggcactcgagatccagcccgagcgcaggtagaggtccttgtcgacgcggtaccaggtttctgggtctagcttacaactcgagaacggattgagggaggaacaggttgtgacggtcacatctgtgatcacgtagccggaataatgcgatggaaggtggccatggattgaagagggaaggacactgaatcgattgtcgagaatgacgaccacgaggagaatgaatgttgcgaataaaccgagctgtacgctcgctcggacctacacaaattcgatgttagcaacctgcttcacaaggagtaaaataatgtcatactagccggcgagccattatgaaatagatatcaccctggcaaggacttgaagaaaagcgaggcgccctgtcgcatgatgcccacggatttcaaatgtatagggcaaaggagaggaccaatttcggtcaactctaggatataaaggacaagtataatttgttttgggggtgaagttgcaggtcaccctcgacgcttgggccccgaaggcggtgactcctgaagagttggtctagcctcccgatgcttggtgtttggatgttggtgattcattgacttggcgattgttactcttctcattatccattttctacctatatgtgaaattcccgtctatcatcaacattcgtatgcaagttgcatgtctatacaggtccaccggaattcctctactggccgagcgaagtcttggcagccacatcgcccactgacaccttgccgctcaatatgtctttggaagtcgagaggattgtggaccaattctggaaagtcgtgtagggcattcccctgcgctggcagtaggtcaccagatctgcaacggcgttagttcagtgtctcggaatctgttacggttcgcccagataaatacctttgccttccttggcgaagagaagatcagtttctgcagccgcagacaaatcggaaacaccgtctccggcgtatagaagaatcgggcgttctccgtcgggcaatctggcataaggcttgatctccagggacttgtcatgtccgaagtggctggtgagtgattgtcagtgaggctgggggaatgatgatcggattgacatggcttacctgtcatcatggtactcaatctgccaaccaccctcgctgttgatattcttgccatctcggctcacgggctcgttggaaatgatggtgaggtggctggcgggcttgtggccgaggaacttctctaacaaggcactgatgatgggtcgcattccagatgaaaggatgacaatgggaacattgttttccttagcccagtagtagaattcctcgaagtatgggtccagtttcatgttctttaacagcgtgtcgatgcactggtcgtatggggtcttgatgctatcgagcatctcgcggaaggcatccctatagtgaagaaagactcattagggcttgcttttggaacagacagtgtctttaacactcaccggaagctcagagtctcgtcaaggacctggtcgttcaacacaaggcgcttttctcggccgaagccaatgttatcgatctgaatagcattagtgaagatctaggatttggcagcgatgcgatataccatgaagtcattgcctgcgattccagtcagcatgcaagtactagcactttgcggggaagcacctactgtcgtcgactgtaattgtcccatcaaagtcggtgaaaaagatgagcttaggcttagtctccatgtaggggagagcgttggaacccatgatcgctatatatagcaatagaaatgaatcgcagtatgtacaattcagagaatgactgaagaaaagcaggcgctaaaattaaagatgtgcccctcggtgactggggtgggtcgagcggtaccgcagcgggccagtctcagccggattttccttttctgtttattccagggctagtacttcacatttattgtttccacatcatgtctcgtctgcgccaggccctgcagcgcgtctttggtgtgactcctacaccaggcgccttgcgctctcgaaccattgacacgaacttctccattataaaaggtaattgtgtggcaacgcctcttcgcaacgtcgggctaacgaaacgcgcagagggagaccgagtcattatacacggcaaacagccctcattgtcaaaagcattgaagcgaggtgaaaagcttcagactgctcgtggagcagtggaccatgaaagcatcattgggaaacgggtctgggatacggtacaggctcgcaaaggtcaatatcctcacttctcgattcttggacatgacactgatatttttgttatatacaggcccgaacatccgagttagcctcccaacgttagaagaatacgtcgccctgacccctcgcttggtcacgccggtatgcgcatcactcttgtgaatcagacacggagatacattggactaacgctaccccagtagatctatccacaggatgccaatttgattgcttcccttctcgacatccatgtcaacactcctgccgctggcgaagtacaacccactctggaaatcctcgagtccggaacaggccatggatccttgacactacatctggcgcgagccattcacgccgccaataccactcctccgcctcgtccacctcgatcccagatcaattacctagaaggccgtgtcattagaccgagtgaaaaggacacggaacaaacaaaagagaaacccgccgagccagttgcggatccagcacaggaggaatgggatgcatggcgagcgcagcgcaatgccgtcattcacacagtcgatgtatcgccaaagttcgctgcactggccgagaaaaatatccggggattccgccgtggaatatacgcaggcaacgttgatttctatgtgggccccgttgaacactggattgccaagcagaagcagcagcggaaaaagactggcctggctgcgctgactggaggtaaccctgtagatccgttcctttcgcacgtcattctggacatgccttcctcaaacctgaggatcccacatgttactccgatgttgaagcgtgatggcctcctagtggtgttcatgcctagtatcacccagattggcgagtgtctgcaactgatccgggaccagcgactgcccctcgttcaggagaaggtgctcgagcttggctctggaatcagtggcggccgcacatgggatgtgcgttttgcgactaagaagtccggcgccgacccatcgtcctggactgccccttcagatgctgaggctgccagtcctgcggaagccgacgagcagtccaccacctctgatgctgcgtccgaggtgtccaccacagaggagcctgcaaaggaaggagagtctgtcttggtctgccggcccaaagttggagtgcgtatccagggcggtggcttcgtggcagtctggcggcggatcgaggaacgttatcccaacgtataaaacctgtactgtatacctgtattatgttgcatgtctgatacggattagacccatttgtacaatatagagaattgtgagaataatatcgagatgcccgaaaagatgtcataacataacaagagacaatcgcttcagagcttcgctttaccctcgatatccgcatctttagacacggcagtgtctatgccaccttcaccttcaacacccttagcagcctctacttcagtctgaataaccactccctccgtcccaggaactttgcccaaaatccaagccttcacatcctccaaaaagctctccgtcgtctcaggcaactcagcatgcaacttatgataagcgccctcataagaacgaagcttcacatcaccacctttctccgtcaaccccttaacaaagttctccgtcgccggatgactagtaacgcgatccccattcccatgtccaaaccagaaaggcagcccagtcttcacccaagccccatccccagccgcaaacatcccctccaaccaaataccccggtccaacatgccggccaacccctcgaaagtacccgtatcatggcacagcgtatcagccacgaactcgtcaaccacagccttattgcgagacatcaaatttgggtcaagcggggagtaccgctgcttatgcgggatcaactttgcaacaagtcgccccgctgagactgtcagctttgacgggcgggaggacgggtctatggcgattaggggggaatacagaagcacgccggtgaagttgggccgcttggatttgtctccgttgtagggtgactctgggtggaaaatgtagtttaggacttggccgccgcccatgctgtggcccattaggaagaggggcatgtcagggttggcgggtaggttttgcaggaaggagtgcatgtctgagaggacttggggggttgggcctgttttaccgcggtcgcggctttctttgacgctgcggccccatcctctggttttgggtgttagttggggtgttttataatggaataggtcgttttctttgtgggtatttatattgagatatcaggataggattcggccttggtttcacacttaccgctgatcgaaagacctgacctcaatgcctgccgatgccagtgttggaaacagatcgtggtaggcattgcctagcaagggtttttcgtcaatgactgtcttatggatggtgggttgtcttgacttattgctcataacagacatgatcaacttacagtggtcactaaagccatggataaaagctagaacagcaagtggagacccgctagtctatatagtagatcgccttgttagctttgaaactcaatacccttatcttgaggttggagtctatctcagcttattcagagagggatcacagctgtgtcgttaaatccataccttccatgtcttagtatacagctcaaggccgtctgggagaatatgcacgctttcttctgtagtcatttcggctattgaggtttgtataaaagctcgagaggtggttgggaggagacgaagtgcacggtgcacgtttcagcatgcatatacgggacctcggcaggaatgtgaagccaagatactaacgccattcagatccaccacgcccgcaattttatagttaaccctatttatacgattttatatcttaaagaatgatagtccactgcgtttggagactctatcattgacgatgtgatctagttaggcctattgtagtcttttagtggtcttttaagatatcttcacccccttcttaagttttccaggtagacagtagagaaaaaggcgagaaaaggcttgatctgaaagcactttgatataatctctaattatgtatatcctaacacaactattatacagagacaagaaaactatagcatagaatcgatacaatagtatcaaccatgtcccattttctagatgtcagctatagatcctacatccttttcttacaaaacttgccagcaatcttagtcgactgtaactacctcttcttctttgtcttttgattcatttctgtattcagtccatgatcggacggatgggtaagaagagcctccaggaatccacgggtcttcagacccacttaccaagatcttattggttcctagctaaatatgtcttgtccaatcatgcttcgccagtgacatacttctctactatatcatgtcaaaatgaccgtcaacttcttgtctgtcctattttgttaccttttaatctttcaatcgatgctatattacctgacaagaagaggtccctcgatacttaggccagcaatctcacaatctctgctgcgccctaaatattcagaaaggatgttctccgccgttcctcaagcggttaccaaccaccaacccaatgtctcatatcggtctctagcattatccccgagtgaagatagcccagatattcgtcagaaataccgaccatttatccttgatgacgagccaactgaggactgggtcaacaacttagacttggccaccgcagcagacatggcagaacataacctacaagtcacaaacgagaggctgagagttctggtactctatggaagtcttcgtaaacggtcatattctcgactagtggcattcgaagcttcccgtatactcttccggctcggctgtgacgtacgcgtctttgaccccgagggtcttcccatgaagaacgagattgatatcgcccatcccaaagtacaggagctcagagaactcagcgtatggagcgatggacatgtctgggtttctcctgaacagcacggtaatctagtgagttatctctcgccatagtctcaacatttccgcattatttacttacaggttttcctgcaactttagactgcggtgttcaaaaatcagatcgattggatccctttgactactgggagtgtccgtcctacccagggccgaacactggctattgctcaggtgtgcggtggatctcaatcgttcaatgcggtcaactctttgcgtatcctgggtcggtggatgcgcatgtttgccattccgaatcagtcttcgatccctaaggcgtatacacatttcccagatgaaggtcaaccgggggatcagcgactcatgcctagtggcaacagagatcgtctggtggattgcatggaggaatttgtcaaatatactattctgatgcggcctcacatcggtctttttggtgaccgttttagtgaacgggaggaaaggaagggaaaggaagcgaggataaatgtaactacggctatttgaaagaaattgaataatagtgtgtcagggaggcaatttattatggtataattgctcaacatactttgttatcatagctggcaactcgatggctaaggtaaactatgagcacattcgttatttgattggcaaattggattcgaattctagaagatactagagatacctgaccaatatcaagattagacctttattcagatgtcatttgatgagacagtccgagcctagcatcaatcatccagcaaaccattccactccggaatctcctcgatcaatttccacataaaattctccagcttattggcacatttggtgtataccgttgtggtaccattgaactgccgacagttactgaaaatcaatctgcaatcctcgacgagcttttccggggtggaataaaaaccttgctccaatcttccttctatggtcgacagatccatgggtgatacgataacatcgtaataatcagggacttcatctttgtcgactggtttgacaaagggccaggcatgctcgtggttttggatttgattcagaaaacgtcgaagttcgttgaaatgaggtccatggcatggcttccgctctagctcgtccatagctggggtccagccagtctctcggatagcagggatagaaagcggatcgagtggagtgataacgccgttagcccattgctgaggtggtttatggataacatggttcttgctgaaggtacggattttggccagaacagactccttctgcttaagaagcatacggccagcttcgagataccgtatccggggaatcatggagcattgcataagtgtgcctccgtcgtaatccttgatacaccccatccagatagatctatcgagcgtgatatctttagtgaaaccttgctttcgaaaatatccgatagcgtggttgtcagcgtaagttaggaaattcatcactggggaagtagctttgacgtaatctttgaaatgcgccatgagatgcgctccgtatcctttcacctgatggtcagattcgatcgcgaagaaaacaatttcggcaaacttgcgttctcggaattctcggtatgatattccgccaatgacctctaggggcattttgacaagtgcgatagacaaatgagaacgatcgtaaacaagacgagcgatgtattccttaggcatattaggaagttgcttttggaacaggcatttcaaacccgtgaggatgatcgtactctcacgggagccatcattgttgacgactcggaactcgatctcgccatttcgttcttctaaaacagccggcttaaaaaagatatccgttagaacattctatgcagcctaacatttgtagttttagcataccttgtctgggaaaggaacccttccgatcggggctggaggttgaacatccggtgttgtcgaactatcgcgagagtcttcgattctttcagcctcaggggtaagactcggtgcttcagaagatgtccgcttcgccaggagagcttccctgctgtccgctgaagatgacagtgactctgtgtcgatcatctttgttgaataccggcgatcatgcgagatgtaaaagcaaactaatgcaggtgagcgggtgtgaatgagcgctctgaagtcgctacaaatgtcaggttgacaagagtccggacctcttggtaagtggttggcttgataattgttccattgtagcaaccatcgcgcgttcttatggttacgatcttttggcctagttacttttgcaaccacttgggtgccgcagcctaagttcacggattgtgcactgcctgcgaacaaataaatacaacgatatgtatcaataataggtgctaaactccttagaatgtcaaatgctgtatgatactagacccatacaaattgagaaaactcaaaacaggaggtcggggggcgcgggccccnnnnnnnnnnnnnnnnnnnnnnnnnnnnnnnnnnnnnnnnnnnnnnnnnnnnnnnnnnnnnnnnnnnnnnnnnnnnnnnnnnnnnnnnnnnnnnnnnnnnnnnnnnnnnnnnnnnnnnnnnnnnnnnnnnnnnnnnnnnnnnnnnnnnnnnnnnnnnnnnnnnnnnnnnnnnnnnnnnnnnnnnnnnnnnnnnnnnnnnnnnnnnnnnnnnnnnnnnnnnnnnnnnnnnnnnnnnnnnnnnnnnnnnnnnnnnnnnnnnnnnnnnnnnnnnnnnnnnnnnnnnnnnnnnnnnnnnnnnnnnnnnnnnnnnnnnnnnnnnnnnnnnnnggggcccggggcccccgacaaagtatacaaagagccacaattattccttccagtagcattgcgataatatccaaaccaaaatgtccacattcaatggcttagaaataacaacagcaagtcgacccatcccaccctaccaaaaccccatctaacccaaccaggcctcaatagtcgccgcactagcgagcgaaggagccatccacccaatagacacagtaataacacgcatgcaatccccgatgtacagcagcgtctacaagcacctaaacggcacactgagccgcgcactcttcagcgggctataccaaggcttcgggccaaccttcttcgcaggaacactctcatcagctgctttcttcaccgcatacgaagcctcaaagacggcatttagcaatgcacaggccgccggatatatgctcggcgtcccgcggccgctgatccacgttgctagtagtgctgttgccgaactgcttgcatgcgctatccagaacccggctgaggtgttgaagcagaatgctcaggtttttcagcggccagtcaatgcagacaggggcccgtctccgacgatggagatgttgcgaaggtttcggaaatatccggctgggttgtgggccgggtatagtacgttagtggcgagtcaattgccggggatgtgtgttacgttctgtttgtatgagatgttcaaggaggatttgcttgagcggtggaagacggggaaagatgatattagacagcagcttgaagcgactgttttgggtgctggtgctgctggaggttgcgcgtcttggttgtttgttcctatcaatgtggttaagacgaggatgaggcttgcggttggtgatcagatagatagcactcggtcaggtctcaagggaaaccctggcttgccatcccgtatcggggcatttgctattgctcgagatgtgctgcggaaggagggtgtagctgggttatttcgggggtctgctttgacctgcgtggcagcgattgtggggagtggactttatattgggtgttatgaggggacgaagatatacttgtgcaattatgaaggctcatagttggcatggttggagattattccaagtcaaatgtatcttaataaatgtataatagaatagaattactctcctccttccgtgttgtcacctaatagaaatatgtaatgcggtatcagcaaccataagcgtatagtgtcgcgatatataagcatgtaagggcatttcaatctacatgtatcagcactctactggccggtctacatagaacaccaaaggttgaaatgaacaaagccatgctctattcttgattgaacctcgcataggacgaacggtacaacacatacataacagacaaaactcccttcgcctggaaaaagaaaacgaaaagcaacctcgtcacgggcaaaaagcagatacccttcaccacctgttccgcccgaacaccaatccccgatcctaagcatcgtgaagccgtctcagatgaggttagagattaggtgaaatgaaaccgagataaatcaggaaacttaaacggaagaagacacagaagacatagagagtgaggttaagagatagagagatgggtttggggggggagagaacgccagggagtaaatggacgccgtctcactacatcaacgacacgaggcaagaccattgttccaggaacagatactccgctagcaaatcaagaggatacagaggaggataagcgagaggaaacggaagaaggacgttcataagcaggagagagaaaacacaagaaagaagaaaagagatacgtaaagaaacaccataagacggctgactagagagccaccacccaaaaagattccgaaataacaagcacgaaggaaagaaaccggttggaaaaacaccccatctccgaagatttcaaatgctccatatcgttagtgccgttgtggcccaaagtccgcctctaccaccttgcccttcttgccctttaccgtaaactctgcaagaagcgcgacatgatcactcgggaagtggaaattcgggaacccgggcacgcggcgcaggtattccttgtccacttcgccgagcagcgccgagacatgcagagtgttggaagagtaccaaacataatcgagaatggctgtgaagtcggatgtataattggtgaagctcagttctcccatggaggagtaggctgacttcaacttgaagggatgtgtcatacccacgcggctgaggtttccgtaaagtcgcttctccaagtcgggatggtcttcgggaagtcgtccagtggagatcaagttataagccgcagacccaggtgaggagttgaaatcaccgcacatgagaacagggatttgatcgccactggtgtactccatcgatggggcaggttccaccacaggcgcggtctctgagccactttcggcctccgagaagcggaatgcggtcttgtccgtgcaggcgggccatttggcgtaattatccgaaagcttggtgatctcctccatcagaatcgcagtctggatcagcttgacgtccttgaaggcaggatcccaatacagatgagcgttgacactgatgaagcgagcaccagtttgccggttttctaagaagatcacaacggcgatgtggtccttctgccaaagtcggttgtagatatcatcttggcccttggcgtcgggtcgacggacggctgtctggccaaaattgatcaattgcttgtccaagaggatgtacttgcttcccttgaagaatgtagcacatccatcgaccatccgggcatcttcctcttgcatgcccattgcacgaccacgtggccagtatacacctttatagtcattgtaggcaagctgttcccggaagaaattgttgtaacttccctgatcaacctcctgaaggcagacaatatctgagttgtgggatcgtaattcgttgagaataagctcgcggcggtattcccaggacaggacacgtgagggcacatagccgtagtgcgattgggttgcggaagagtcacacagggtgttgtacgacaatacggtgatcttttcggtattgctgttggacgatgttgaagtatcatcaaggatcacccagtcacgatcgggaggaggtaggtggactgtaatgataaagttagcaaaaaattgagcggaggaagcaggtagaacatacctggcatctcttctttcaggtacttgatgagagccttggttccatccttcatgatctgagatttcagaacatcgttcagggggttaccctcgatgcccaaggtttccaaccggtaaaggtaccccatttcgtaagggagagtgcgaatgttattatcgaagagaaggagtttcttgaggtttgaaagcatgccaagttctgctggcagctccgtcaattcattgcccgacaaatccagatggttcaacttccgcagttgtccaatagccgggggcagcaccttcaacttgttagagttgaggtacagcttctcaataaaggcatagttgaacaacgaggtagtcaaagcgcgcaatccttgaccaccgaaatcaagcgcattccaaccctgtcggctagctggcttccccgcagatgcaccatttcgcccatctgcgccgttttctgtgtcggtgttgctggacatgagctggattcctttcgtttgttgcgcaatgacgcgggcatggtagtggggagaagtagcttgtctcgattctgccgcaagctggagctgctgctgccaatgctcgttcattgattcatcaaggtcatcgtccgcggtcggtactccgttctgcaaatgagtcgaggtgaagtgagaagttgtcgtcgtggccagtgtgccgccggggaaattgtgttgatgggtgaggttgtgggtcgcttgtgagtggtgggcatgatggtgcggttgctgtgtatgatgagagtggtgggtttgcgactggaatttcgggatcggcatgccaaaccgctggtgggcttgaccgccattcatcataacatgctggccttggtgggtttggccgtacatgttgttaaaagggctgagagcagcagcctggttgagggcaggggatcgagagggggagggggtgtcgttgttgaatttcagtcgacccgtcggagaattggtcccgtttcgaacaatgtgtcgctggtgagggttctgctgtgcttgtgcttggaagtagaactgcccggccccaggctgctggaacctgtaggtaccatctgccatttaacgtggcagacgagaccgtgatttgtttcccggatggaaaacctgttggttggtgggcggcgctaagttgagttgggtcgagaagaggagaggagaggatcggaggcggtctcttctcttcttccacatagaggcctaaggcaaagaaacacctgtatcaaaccacaattggaggtcgccggaggctttggcactgagagtatctttatgtgtgcaatggagcggtacctaagggcgtagattgggcggaagggtcaaaagaaggcgtgatcggaaaggcaaaaagagatcgagtttggtgatgagttgaataaagaccagtggggcacgattaacgtagcaaagaggagcaaaccagacgattgtctccaggtcgatgaggacgtcctgagatgacactggtggtttgcaacgaggcgggagtcacgagatcacgtgaatcgccgcaagggccaaagtcttcccagctttgatgaggttgaattgccaagacaaaccggttccctcaacggttggaagtatctttgatgagagattggatgttgatcacatattcttcatctatcctgcactttcgtattactttgtgatcgatgggactgtttatataaaagcagccacgtggtcgccttgcctgccaaaactacgggcatacgcagctgtctctggcgacctaagtcgaagctgcatggattttgattgtgcctagacatcttgtttgaagctagccaacactacagggtgtacaatgaaaggcatcgggtctaggatggagatatataacaagtggccagacctggaccagaaggttgaaagaatgagcaacagcctgatctattctaagcctcgctaataatatcctaaacttctcaaatggagtctgtctttggttttgttctataggtcataggatcctgtgtcaaagtacaacaaggtcagtgaacctcttggcgtgaactgcttgggcgagacactatgttgcaataataatgaatggactgattattcaatccacattccccaaattccacaatcgtatgattaaggagtatacaacataggccgcttctattactatgctgtatattgtatggtgtttactccatactagcagtgataattggctaatgccttggcacaccaccctaacaacataagatatatggggtacggagttgaaggatcactatcaaacgatgtctaaatagagggttttctataaataattccaatcctcaaataatactccttctcaccttgagagtcctacgagtagtgaatatagagatatgtgtcattgagatgatctatgtacggctgctgcaaggtatcacagacctagtataactcgcatattcacaaaaaaggggtatctgcagcttaatgcaaccacatgctctagaaattaccccgtacctccatcttcttaccgatcatattcgcctcgccaactccgtctatattccgtatatttccgggtcttcaaaaatgaaactagtcctaaaccaaagtacaaaagtacgtggcagacgctattgtgtcgatcgaattctcgtatcattctgcaggtacgttaatactaccctgcggaaggggcacggatcacactgcagaccaagacgatcgcgtggaatagtccatggacaagtgcctgggacttagcgtagggcacggggtaagccggtagattccagcgttgtatcagataaagcgacagctcagtctcagagtgtcggggcccagactgcggatccaataaatcacttggtgatggatatggcgggtagggatctccgtgtgtatccagttttaccgtttgaattggatacggagtacggagtacggagtacatacgagtctgctagtactctcctggctacactttgctttttcttttggatgtatcttatcaatcatagaaagcattggcctatatttaaggacgttatactccggacctcgtatatggttctagcccctgaagactatatagatcaaaaagcaaaagcgacctaatatgcaatagttatacaacatccatcacttctatactccgtagtctcgacccgttaggccagcattccctttttggcgagggaaccatgggttatggcttcaatgagagtcatgatgtcaagaccggtataaaaatagggagacactcattcgcactcttcacgttcactcaatgtcaaggtaaaacaccccaatactgatattttactaccggagtaaagtactgttactgttaccgtgaagacacgaacagactaaactagactcgagtggatatcaacttccaggggtcaggtctgcttttttcttccctccttcccccccatttcttcttggacttctcgaatactcttcgcttcgaaggatctgcgttgtacgcaaatccaaaggattatctgcaggctcagtccttttgttctgacgttgaacaagaattttcagctttgcgaccggctgcgctaagaataatttccgaagccgctttggtcccctgtcacttttcctgttcgactctattttttcgatttttcgttttattttattttatttccctcggaactgtcttccactcgaaaaaaaagcattaaaggaaaagaaaagtatgcctcgttcatgaaatcagtcttgcgccgagaatgcgaccgaacccacaacccatcttcagagtcataggggacaccaatcgatacacttgaagtgatatggacgtaatggcgttggggttctcagccgcagccgcagccgcctccggttccgacctacactccaacatgagctcgacactggccgctacgtcctcctcgtccttgagttcactcacggactactcaacataccctctgatgcgctatggtggccgcacctacttgcgcgacccggagaacgtctaccctctgccttgcgacctacccgagatccaccgccaaagcttgcgcacgctgatgctgctgcgcgtcctcggcggcccattttgcaacccccacctagccagtcggccgcccaaacgcgtcctggagatcgcatgcgggtctgggctgtggtctggtctgtgccacgactacttcgcccgcaatggccatcccgatgtggcttttgccggaatagatattatctccattgcgccggatatgcgcaagcagggaatgaattggcaattcaaacggcatgatctgcgtcggccccgcttgccatttccggacgactattttgactttgtattcattaaagatgccggcatgtgtccgtacagtcccgcgcaatcagcatcgggcttgagcgagcccctgcgcgtgttaaagtccgggggcatcctggaggtgtgggattcggattggagcttccgctcgctcctgcccaatccagccccggcgcggaaaaccacatcgaaggaacaggagatcgccgacgaaacagctacctatacattctcctcggccacgccgtttacacgagcgcagaacaagttcgtcgttgattataactcctgggtggaaaagtcgttcgaccgtctcaagttgacggcgctcccgtgcgcaaccatcggtctatccttcaactccgaagtggacttgctggaaaatatagacagtcgccgcgtcgcaatcccactaggtgacttgcgctgggagcgcgacggccaaggcaaggattccaagagccgtccacgcaaggccctgactccagagcagatgtccatccggcgcacggctcttctcaccacaatccagatgattgaagggctggagccgatattgatggagtctagcggaaagggccgggacgaatgggaccgatggtgggctgcaatgacagccgacctcttgcagaaaggcggactcgccagcggcgagtgcctcgaagtgagcgcctggtggggtcaaaagaaatgaaccccttgagtcaatttggagttccggtgggcaaaaagtcaagtagtgaccgttctgcactttttattggtgataccccaattttatttctatctttctaggtttctaacatgcacatgatctggacatttttagagaggtgagagtcatggaattatcaggcctcacttccatatcgctttttcagcgttcggtaccgcttcaaatagtacctggggttttgtttatcttgttagttgccatcaacgcaaattcttgtgatgggggtcaaaatagttcttgcatgatgccatgataatgaggagtgaacctatgcacagtgtatctagccagacactacccattatgggtgcaatgtatagaagaatgacatgtacgaatgattccacttccagttgtaatgaagcaatataggcagtgaacgaggaagatcggacgacaatgagatatatagggtagggaaaaagggagggttatagggaacagtcttacagtgcttccacttctacattgaacaattagcaaatatcctgcaaccgagtaaaggatatgaatcccagggacatagaaagcacccacctttcttcacaaactccgccctcgctattccctttcggatctgctcatcgtcggtaatctgagtctgacttgcaaatgcacggtgtagacgatcccggaaatactgatagcccagagggtattcccgtcccaagaacagaagctctgtatctcgggtgattagcatgtagcatgtaacagatgacgggcttgcgactgaagggaaaaggaatccaagttatacggcttcatacctttgtagacgttaatgacctgtcgacgtagctcaagatttaccattatcgttccatccaagaactaggatagttgaaggatcaacttgggtggtggggatgcggtgcattaaaggtaggcggctgagaagcttccaaacctcgggtgtatcggtgacgggcctggcggcctccatgacatatactaccatattccatgttcttggggcaatatgtattttatttcttgggtttacgtttacgtacgaaactatataaactctgtaattataccatacatacttatagattaatatcaatacagcttcggttcaaacgccctactatattcacgcggggttctagccgacctcggccccaagcttctgtttatcggttatcggcggacagcggtctcgccgaatccaacaccgcaactgtctctctcaacaaccacgcgcaacatgctccctcgatcagccttccgagcgcagctatctgtctcaatttctctgtgctcgaatggcgggcgtcgtcttttctctgcgactgcctcggcacacagtcaaaacctccccgactcggccccgatcaatccacgatggctcacaatgaccaagcgaaggatcgggaagtgcctgatgtttgggatgaagccagctcaggttgacgaggggggcaagattttacagcaattggctaaggaatggcgggaattgatcgctgggagtgagggattcctcacggataagaagcgacgtagtttgtttcgccatagtgttgtctggggagaacaggtatgagttgggatatattgctatatatacgatggggatgagagtcattaatgctaagtctgactgttgtggattaggatattatggtgagagcattcgtgcccctagtgcgcttacagcatgcgctatcttggatttctggactaaagctaactggatgatagggtatgctccgcctttttttttaaaaaaaaaatatttactagtactccaattcatggattataccgtactaattagtccaaggtcacgtcaacaacgttacctatgttcgatacgcggagaccgcgcgagtgaactggacgcgcaatatgggtaattatatcgatccggcaaacaagaaagcatggataaacatgctttgtaatacgggaatcgggctcattctgaagagtatcaagatggattacaaatttgtactgtatccctgagacccaaaccccacactactggaaaacaactaagtagacctatttacttactatcacgcagcccatggaatccccagacaaaatcaccgtttaccaaaagctgctcccagacccatctggacatcttgcatcccaatcggccttccgattcgaggtcatgatcatgtctgaagcccaccaacgccccgctgctcgttgcttcgaggataccgtggtctatgactacggtaagaatcgcaagaccgagaatatcccgccgtttatgatgaagcagtttgagattatgtgggagcaacaggagcaggagaagaagcactggagacggaagatagctgagatcgacaatcgggttcggaatcttgagcttgagagctgggatcgggttgatgccgtggaggataacgggtctgcgtcgcagtgatcaaagtgggggaaacgttgaagagcggattatatgggactccttgattgacacgttgtaaatacgcattcctcaagcatacctgactactgatgaaatctcggacgagggagatatggtcataatattaatggtagcagcggcgatgaaccgacatctcatttaagaaatgatttgggcaaaattggcttagaacttgatccaggtgtaattatacaggatgagaacccacgggtttgaatgtcacatcatgtacatacatgcacatctaacccgtgatcaaaaacagccctaattcatgattgaactgctccccagggccacaacactgaatctacccgttattttattcgcccgcagacatcagctgggtgttcgccaaagaaccattaccatacgaatcagaaacagagatccacctttaactccactagtcaaacaactcaaagtttcaacctctttgcaatctcaatcccctcggcaatggatcccactcgtgcatcaatcgcatacccttcactctccaacttttgcaactcagccgaaagctccgacaccggaagcgtgaaacattcaatgaactcattatcctcgagatcaggctttggattctgattttccggaagagacatgtcaacctgaacgtaaaccatgttgaaattggcattgcagaagccgggatctggacaagtatcttaagtcagctaatatccagtaagacgaacagcgggcttaccaaccgttatacataatgccagtggttttatcagaaacgccgatataccctgtctcttctttcagctctcgaactgcagcttgctcgattgtctctccggcatcgatcaatcccgcagggagttctataacgacctggtcgattggaggccggtattgcttctccagcaggatctcagcgccgttcatattattcagaaaagcgacgatgttgactccatcgacaggggagtctgtgggccttgtctacgatttgattaggtctttacagttgcatttacatataggttagaaaatcgtacctggcgttcggcagactcccagtctctcttgactccattgggatcgatgtagttcgttttgactagtcttttccatttggcttcttgggaggtctaaggccgtaagtagctgagagtataatagtcgggttaggagcacataccaagggctctcgtgagagaaatgtggacttaagttgcgtcatttatgtaattgcccctcggcttttcggaatgggaattgcactgcgagtaactgtgacctaaatactgggttgtaagaatgtcccaattgattgcaatcgtctaaagcgggcagtgcccgcgggcggggataacatgatgactaatgcggcgctggacccccggggccggggccgggcctgcccagattgacagccttaggaatgtcaacgcgtgtttttttttaaacgagctaccgtagcatatcatttatactcattccgaatgggattgtcaatcatctttgcctccagaaatctccttggtaacattgtgttcttagggatattgcctatgagagcaccgctgttctacacgcatgacagggtccgcatgagttcatcaattataaacaacgtcaatccttgtgtcgctgtctgtatttattataccgatccccggcgtcaccgttgctttggaatgtgaaaggattcaccctggacctactacagcgccgatgtttaccccattagttagcaaagattatcttgggaggatgaatacgacagttgactatcgtgctcggaagatcagacatagacgggtgtttatactgagtctagttgtattggggactttagtgatggtttaggtactactacatgcagctgtatatcggtacatatgtagttccaagattttaggtgtagtagtaatttgattttggccaagattggccaaagtcttggttgaagttaaagttaacattatgcgggggatggaatctgcctagatgagcttcgggttcatttctcatgtcaaagtatacattttcatttattgtgaagaatcttatctatcccttgttcattccttgagcatttcatatgtcgctttctttctctgacatttctacagtcattgctggatgagaaagagatatctaatgcatatattccgttttcgacatttcaagagtacacataggggccatattttccgatccatatctgttttgagatatactatactagaggcagtattcatgtgtatacctgtggagtataaatttgctgttaggatcctagtgtttcaggatacatactaactgcatgcggttaaagtaaactttaagcaaatttgcctcaatgaactacaaaagattagattgttcaattgattagactatgaatgaattatagaggctaaaaacctccacaagtttagccacttccgtagcaattactggactcaaagaccccgccacaggaggggagagccgggattactaggaaagcgaaaggatcgaccttgaaaacccgaagtttatcggacccaagcaaaacccggttctaaaataggcaaggcggacgcgctagtggaagtgtctgcaattgtctagaattgcctatgcagcttattgttctgaactggggctgaaaatctggaagtataaaatgcgaaagaagtgatcgagatggtgcaccctatatactccaggtgagacaatggtagggctcatcgtataaaaataacttaagccatcaccaagcccagccgtcgggccgatctttactaagcttgtggctgatctacgaaacccttcagggttgccaagcccgggtatcgtataagaggggaaggatcggaattggcaaagactgtacggcttctgtcttttactttaggatatcttctttacagtgtatatagatatctagtctgcacgaggcatcttgatatatccaaaaacgtcaccatttggagatctaccgacccatgtactcgtatgatacggagccttcaggaagatgcacgagatagccgagcatgtgatgatccaagaaagaatgtggacgaccctgttgatacacacctttgatacacacgagcttcagttccccgtacttaatcccatgatgctctccaggttcgggattgcgtgttcatacatgcaggcgcatccgcaagcgagtccccatggatccgtaacacatatcataagtccggcacaagactgaccccgcagcagacgggtcgagaaacggtcgatcgacaatccaatcagtcaggttgacagcaaatagggaccggttatctgaacaggctttcaagttgatctgtataccgtaggtactccgtcactagcttatcagcactagtcaatccgttttgaagaaagtctatatagcgccgaggcaacgaaaacatcagtatcgtaaactcggctggataaagcgaaaacacgcttaggattggccaatgtgcaggtatccgcgctgcaggacccggcaaccacaagccgtatagctcctatatagggggcgtgacctgtcaataagccccagagtatcgtaagatacagaggccaaagaaagaaagcttggcagtggattggccgtattgactgggattttccatgcagcaactccagatcgacaaagaagccacgggaatatattaccaggagctctttaattgaatttgcaatccggcgtcgcgcaagtagacagtaccgacgtgacatagtggcgaatggtattgaggccaggtaccgcctacccgaacggcaccagtgatcgacactgaatgacagtaccaataccaaattctgtttctttcgacttcatacaattccacctgggcactttttccccttcacgcttccacgtagagcgtcgtctcttgccattctcgctcatttcttcttttccttatacatctacttaccatttctttctcatcttcattaccatacgagccactctgcaccatttccttccccccaccatattcaatttcagtccgttttcgcctttttcctggtcccagtccttggcttcatcccgccaagctgactcggacctgggtttcgggctccctcgtccatgacacgctccgctgcatctaggaagaaccagagcaatcggcaggagaatggccttgtcggtcccggcaagaaattaactaagcaaaagtcaagcggccatctgaacggcaactcgggcaacggctctgctaccggtccgggcgcgtccgctcacttcgatctatcctccgtacggtctgctagcgatacggctttgatatctccgacggttgccggcaaaggaggagatagcacgaaggcagatggcaatgtgcgtgggatgttgaatggacatagcaagggtggagacatgacatctgcgcaagaaaacggcgatgtcgcccagaatggtggcatagcaggtcatgtctctcgcaatggaacctcgaaacgatccggatccaatgcttcgattaatccgctccagctcgcatcgactatcctcaaatcgtgcccgatgtacgacactatcgccatcttgatttttttgctccagcttccaccgatggtcttgaccctcgttcagttcttattcgcctccttgactttcatgcctcccagtggcgccgcggccggttctttgtcgtcgaacttcgatatttttcagggtccggctgggacgccatctctggggacaatgattgcgatggatgggttctgcatacttctctggggccttttcatgtggaactgggcgcagaactttgccatcgatctcgctcatgtccaagttgctatcaccttgggtggcgggggttccgggaagaacggcggggtcaatgctctctgtgtcggaattgttctgcttcttcatcttgttcgcagtaaaggcatccaggactttgtcttgggtcatcttgtctctgctaaactgctcagtcccgatcttctctcccaatattcgcatctgctacccgctgagttccgacactccgaagcacaaacgtctccgagctggctccgcagccttcttgcggtgcatatcctcgcacaagctggaaccgccatggcgcgacgttcgatggccaagaatcggtcaccgacaccgttacggaccggcaagcggggagatacggaggcttctgcgggatcacaaggacaggcagattctgctctggaatctgctgccagtgtttcgtcttgtttcgtgggacctgatggtcagttgaaagacggaaaggatcgtttcacgtcagctaagaaacgcagacggcaagccaatcaggttcggagccgacagccgttctgggctgcgcttgccagtacaaaagtcacggtgatgagggaatatgaacattcgcgggctatctccaagacagcccgcaatctcacaatgacggaggaagatctccagggggtgtctctcgacgacgggttaatatggattacggatgtggatagctcttcgattaaattcgccgcgggtgagtttaccgatgaccccgcggtgtcaggttcatttgaagccggtcgtttggaaggagacatggaaccattctacgtctgcgtcaacggtgcgctttgggctaccgcttcgatatgcagagtttcagacgccaagggaccgagcgttgtccaatggcggggcgagattgctggacttgctcccaattgcgcatacacatgtgcatttgtacgaagcgataccgacgaggaaatctgtgtcatgagtgtcaagacgccttcaacgactgacacagagcaaggtaagttcaggctaaaagacaacgtctcattttcaataagctcattgcttgaaatagtcatttccgcggtatcgacacccccacagccgacctaccgtccatcgtcccccacaacgacgctcaagaactctatcagcaatgcggaatcaaagttgaacgaaaagcgcaatcgtctgaaaaagacgaagaacgaccataaagctgttatctcgaaaatccggaaagagctcgataacttcaatgctcgcctccaaagcggaaatgacgagaatcgccaaaagcagcgttcgcttcaacttgaacgaaacatccggcagaccgaagaggctactgcggtactagaggtacaactcgacaccatggaaagcgttcctgaggaggagatggaagagtgggcggcgcacaaagcggacttcgaacgcgagctggaacgtttcaattcgaccaaggaagaggttgctgctgctcgaacggctgcagctcagcaggtggcggcactagagttggaattgacgcaggctgttcagaagcgagagcgtctccagggtcgccgcacccgggtgaacgagcagtatgagcgtatcatttcagccaacgcacaagggttgaatgagagagaacgtcgggccgctgaacaatttgccagggaacaggaccagtcaaagatggagagcaatttccacgagcaattcgggagcatcagccaatccgtgcaggatttccagctgcgcacgagtcaactctggcagcaggcatctgcaattgagcagtccatccagcaacaacaacagcaaatgctcctcgagtctggtcctctcacacccgaaggcaacttgccgggcaccaatcctctgcctgagaccagtggtccgtcgttcaacgcatctacgaccactgcacctagcgctcgatctctgatggggggtcttagctttcctcatgcgagatctagtccactacagatttcgtcttctccagtccacgagatgccgtcaaatccaactagcccatcgcaagaccttcccttcctcccacagtttccaaactctcctgtcggcaacgtgggctcatacttcgggtcagaaattaaccaccgagaccgttcgttctccaaccgctccactcgcagcagccaatatggctctgaattcttggacacgaaccacttgccacctctccagcttgacctagcagaattgcttggtgagaccaagactcggcctgggtctgatggtttcctgcatcaaggtggccgtacggtcctgagccctttccagcgagcagtaagccgaggtagtggcagtggcagtggtagtggcggtagtggcagtgggaccggcagtccgcactcggcacgagactagttctctcggcggttgctgttgtggtctcatgcctagccacgctgtcaacccgccatgcttgtcttctgagaagtggcctcaagttttgtgcgtccgtgcttttggttccgtccggttggattcccgccttccgttagtcaatctttctcggcctgcgctgtgatggctctggtttattgggccgttgtagtgtggcacgcatctcgcgatgagatgacaactatatggattcgatcgaagtgagatacatgacagctctgttcctaacgccgaaaaacaaaagtgttctatactcggttcttgtatactctctctcacaaaagcgtagacgcatcaatatcatgaaagcatttctcatcttcatctctccatgtctactgtaggatcatagtggataggtcgtcgatttggctttgatgccatgtctaatcaaaagtatatatccagcccaaacgccgttttcccaagtatatacaatggtttgccaatagcataagcgataccgtattcttcatctatatgaaaccagacatggctcaaagttcaccccccatcttccaaaacttggtatttgcatacgttaaacaaagccgctcaggtaaatcattcaaggccttatcgtcttgtcccagtgccaaaacagacccagagccctcaaccgcccgaacaacagtacccagcacgatggagtgatcattcacatcaatcttctgcggatgtagggtacattcaaaaacaaaaggaaactcgaccgcgtcatccacagcgattgcttccgccctccgcttaagaataggaagcgatcttgacggatatccctgctcgtccttagtaggcaaagccgcgaactcaaactccccatgtcctctcagcatagaagcgagtgcgatattccccttagagaaatccctggccagagtagcagtcgcgggactcggtgcaagtaaatgaaccaggaaccggcgcgaggcaagcaacgcattcaatgtctccgatgggcggcgcacgttgaaagagatcacagggtccggggtgagagtgacggtgctgaaggaagagacggtcataccgcggaaggaggttatattttctgaaccggagggatcggttgctgttatgattgcgacggggtatgggactcgccgcatgaggaggcggacttggtcggatatagatgtcgagggtgttggcggttgtggtgtgttgtctgcgtgggatggggcattgggcttccctgttcgaccattttcttttgaaggcgctgtggaattgctggtatatcgtcgttgatcggatcgtgatcggtgtttggtgtatggtacaggcggagaggttcggagggagagagatgttcccaggaacaagggtgtatagttgttaatgcatgatagttctggcattttctattagtacaggacagaagcattggacatacatcgtgacaacctacctccgagtgctgtccgagcagtcccatgcgcgggaaagacgagcttcatcccgtcggcctggaattgatggagctttgagaggcgctcaggggatcacgcagggcacaaagtcacagataataagactctgccaattcatgtctaaattgacagcaaaaaaagagagactcaaagagacatagggcaatatgaagtcatgcaaacatctaagttatgaaattcccgaaaagaacaggcccgcttacgtaacccgcgataatttctttgctatggcatcaacttcgcaacctccgcaacctccccgatagcattgcggccccgtcaacctccgccgacctcgacaatactccttgttatttgcatcggcatttccgaaacaacttatacaacatgtcaatgcacacctctctccgccgcacagcggtcacaatcaccaactcaacaaccaccatcctccctacaagactacccacgagcggcacaaccttcatctgctcgcaatgccgacacgccactctcctccgccgccccaagcgcccctacacctttacacagctcatcacgctttcggacggcagcaccttcacgcaccgcacgacctcgccggccccgatctaccgctccacgcgcgacacacgcaactccatcctctggaacccgtccagcagcaagctgatgaacgtcgaggaagacgaggctggtcgtctggcggctttccgtgcccgattcggccgcagctatgatgccagcgcggcgcctgctgcggcagcggaagaggaggtggctaaggactctcttgcggctaaggaccctgctcttgcgaagcgggccgaggccgaggcgaaggctgctgctaaggcggagcaggaggaggaggataacttgcttgatttgattagtgctttcgggcagaatgaggcgccgcctccgcctgagaagaaggttcctaagttcactaagaaatagtgggctttggatgtcccgggttgaatcaggttgttctgttttggactgcttggatgggagttgggatcttcttttgcttttttatgttttcttttcttttcctgtgtttttgatcttgtacaatatacatatgtctggtatgagcctgctgtattataccaagaattcatcttttctctcatccatgctatatttttgtcaagtctatactattaccatgggtcttgggagcacctgcccaggtggtccttatatactgtgactattcatacacagccgattatctctaacacagactaacacctgagtcttgttaacaaatgatacaatataaagtaaacacgcattagcattcatcaccccacctcagcagtatctcgcaaggtactcagctcgtgggcatgtggctgcttgatggagtggtctatggtaggtatcggtctagggccagaggaagatgtatgaattaggacagtataactgactagggtagataatgattttatttgccacaatacgcgaacagtggtattcgaagtgcagtggaaatagaagaaaaacacaaagatccccagcttgctgaggaccatcatcagttgcagcatggcataaacaaacatcgcgaaagggttgtcccataataaatacaaaagacgagatagaacggtgctaattccggggttgggaaacagcacccgagactgaggcatatcaagcgtcatcctcagcggccagtagccccgattcatctgtgggctctgccggagcgggtgcatcgctcacctcggggggtacataatacggaagtccttcctcgccagcatctagacgcagaaggaatgtctcccagagttcgatcaactgtatttagggttagctggatgaaaaaaaccaccaagacttggcgagaacttacctctttctgagcctcgactgcactttcaaggaatgtttccacgccagacttgaagtcctccactttctccttctcaaaccgttgtagttcgttccgcataagacgacccatatcttcgaagagcagccgcgtttggtgcactttgcgctctgcatctgcaacgtcggcgttgacttggtttaagcggtcttgctgagtctttccctggcggagtagcttgtcttggttattcttgcgcttctgtaggtcggactctgctgcgtgccaggtgtggaaagccttttgccgctgcgtgaaagccaacttgacacttccaattaaacggatatattcatcgatcgtgattccaagcgtcagaacatcctgctgcgcctgtcggtcataaagttcccgaatgcgcaactgaagttcggacaggccttccaatgggtaggaaagggcgggagacagctcgacggcggataaggcatgcaacgagctcgaaaagtcgcttgcggcctcggatagtccctttcgttgtataaccacagtatccattgatttcaatagagccttcagctggttctccaatgcatccaggtaaacttttcggtcgtggaaccactatttataggtgagcaggcgagaccgatgtatcagaaacgattcacttacatcgtcatgttccacgaatttagttcctccaccaacagaaataccaaaggagctcagcattcccttgcttgggccaatatcaggctctctgttttccttattcttaacatcaacggtgaaagcttcactttctaggaaaattttcaaatcgccgtcatgttgaagaataggatggccggcaatcttgttgagcattcgttccaaggcagctctcctcgactctacaaagttggtatcaaaccggccaactgcttgcttctcgggcggaggcgcaacgaccactcccgggttattgctgtgcagggagttgtagagccagaggaaatcacggtatcgacggctaacggtgaactcgggttggcgataggccttagaagttgtctagccataaagtactgtcagcctttccttttccactgtaaattttagtgtgtctaattacctttgtcgaaacttgatacacaatatgactgcttgtcagatctcccactttgtgcggatctccgacatagatatggaaagtcggcttcgcagcctgctccacgctcatgctaggctgcgtctgtcttttcggtccatccgcttgcaccggtggttgcacgggagggggtcctcggaagaccgcgctctcctcttccaaattggccgagtctgctgcctccactccagatgcctgggagggagatgaaagtggtcgtgcaccccgtccggcgaaaggctctttctggggcggtgctggtgcctcatctgtgggtgttggggtgtcctcgacgggcgcttctcccaatggaccgagagggtcgacggaatcatcgatggattctagtttagtggcttgtgcgttgatcttgcgcgtccctcgggggcctcgtcttcctggtgtttggacagcgggcgagctgtctgacgcgggggttgcagctgctgtgtggtagagtgcgcttagtgaaagttcgtggaaagagcggacaagccagataaaacataccaccttcttcggcgccgggcttggggccgtcgctgtgcttgaaccgcgaaggctcatctgcatcataaatcagagtgcgattcaaagagctgtggtatgatgattgcctaccgccccacggggaatctccagaatcgagatccattgctaccggtatgagatcaaagcgaagagaatgggacaacggcgagaagacgaatcaacaaattaagattaatgtcagttcaatcggagcttagagggtgcatggagttggagagggagctggttggagtggaggccgatccgcatccttagtcactcacgggatccgggcaaccttggaagacctggagtccaccccatgtggtgtttcgtcttcaactctttgccattggcactactctttgatctgggggctatttatttatgctcatgacgaatacaacccactggatgccagtacccgatactctctacacattttaatgtcccatgtctcaacacgtcacatcatttcaattggagcttcttaatgtcgggatgatctatccacgattcccccgctcaaatcaccatcggcatttaaaaggtcattagcaaccgcgcaatatctatttgacccacgggaggcccagcttgtgcatttccacagccagctggaagatgtaatccagactctcacactgagtcttcgccttggcagtgttatcaccccagacgtaactgcaggaggaaccaggataagtatacatcagtatcacatggagggaggttgctatcactcacattccgtgcctccggacaagaaccgcgtatgtgtccgggtacttgttcatggctgcctccaaaccactggtgaggtcctcttcgaaggcggtgttttcaataatgggaatcttcaaagtatcgaagaacccgagcatgccctttcctttaccgcggggaatacccttgatctgctcaatgttgctgatctcgaaacaagcatccgggcccttctcccgctccaccaacagagtgatcagaaccgcccattgcgaatgagtgtggatgcagcacccagcaccatgctcaaaggcagtcaggaatagtggggtacaggcggagggattaagcttgaggggtttgcggatgtagttgcggtccgaggcagggtacttgggggtcggccattggagcacgaagatgttgtgaggttgtatcaattccttctgaactccggacggagcgatgaagatgtgttcgccttggcggatcgatgtctacttttccatcagcggggcaccgttgaaattttttttgccttgcaagtataagcttacaccacctccggtgccggtaacccatccccagttgtagaatttgcgacagagctcggggataaggttggcggggtgttcggggtcatcagactggaccaagtggtcattgttcggcgcaacggtttgctctgaggtgcacatgatgggctgcgacatattagcattggttcaggtagatattcataaaggtggaagaggacctaagtttgcaagtaaccaaatttgttattgttctggtgagccacgaggtttccaaggtttgcgacgagagtgctgagtaaccaatacgtttggcctcgggagcgggggactacatattcagcacgccattttaaggaacagctcttctagaattgtacttgcagcttaatgttgatatcaaaacacttgcgatatttaaatgtaggaagcttaattgcatctccaatcaggtccttctcaattgctatcagtcggtgtttggtgttctctactaaaatgacaagtgtagtttaactattcatagtttggcgctagtcaaaatttgctaaacatgcttagtaatgtcgctgcacaattgcacataactaactaactagcaagacacgccaggtctgctgtcaccagaagacgtgctctaattcattttagcgtcggaatagacagactagcgtctagagtgctctgcttcctgttagggccacctttaggaattctttaagaatcctatagattccgcgacctatgaacggcttacaccatcaaggatcaataactgcgggtatttatacacctcctcacttattagcgttgggagggaaaaataggattgaatcaaataaaaatccaataaaaatcaataaatacatgactcgctattagcttgatgaacagcacataaaaccaataataacacatatactctccgagcaactatttgtgtccaatcactgtagaacaagatcgaaacccgtgtgtacacgccctagtcccgattggggagcttagggaagaggccacctggaccttccccccagtgttgccctttctataaaaccacatctcctcttttcttcacttggtgctgtgtgctccactttcattccttctacttgttgttcacaatatgcgctttaacactgcgttgacatctgctctggtctcctccgccagcctcatgggctacgcccatgcnnnnnnnnnnnnnnnnnnnnnnnnnnnnnnnnnnnnnnnnnnnnnnnnnnnnnnnnnnnnnnnnnnnnnnnnnnnnnnnnnnnnnnnnnnnnnnnnnnnnnnnnnnnnnnnnnnnnnnnnnnnnnnnnnnnnnnnnnnnnnnnnnnnnnnnnnnnnnnnnnnnnnnnnnnnnnnnnnnnnnnnnnnnnnnnnnnnnnnnnnnnnnnnnnnnnnnnnnnnnnnnnnnnnnnnnnnnnnnnnnnnnnnnnnnnnnnnnnnnnnnnnnnnnnnnnnnnnnnnnnnnnnnnnnnnnnnnnnnnnnnnnnnnnnnnnnnnnnnnnnnnnnnnnnnnnnnnnnnnnnnnnnnnnnnnccagggggaggaggagactgcggataccaccgtcattgaaaagcctaccttcactgtatgtatctgaaacgctccctcttcgctcactttgctaactcccgcaagcctactagccttaaagctcctttcctggagcaattcacagacgactgggagtctcggtggaagccttctcacgcaaagaaggatgacaagtctgaggatgagtgggcttacgttggtgaatgggcagttgaggagccctccgtcttcaagggtatcgagggagacaagggtctggtcgtgaagaacgctgctgcccaccatgccatctccgccaagttcccgaagaagattgacaacaagggcaagaccctggtggttcagtacgaggtcaagccgcaaagtgagttatgcctttctacatttgttcgagatcttatatgctgactggaattgtcctgtgttagactccctggtttgcggcggtgcctaccttaagcttctccaagagaacaagaagctccaccaggaggagttctccaacgccactccctatgtcatcatgttcggacctgacaagtgcggtgccactaataaggttcacttcatcttccgccacaagaaccccaagaccggcgagtacgaagagaagcacctcaagactcctcccgtggcccgcaccaacaaggtcacctccctctacaccctgatcgtcaaccccgatcagacctttgagatcctgatcaatggcgactctgccaagaagggtagcctcctcgaggacttcaaccctcccgtcaaccctgagaaggagattgatgatcccaaggactctaagcccgccgactgggtcgatgagattaagatcgccgaccccgaagccaccaagcccgccgactgggatgaagatgctcctttcgagatcctcgatgaggaggccacccagcccgccgactggctggaggatgagcccgagagtatccccgaccccgaggctgagaagcccgaggattgggatgacgaggaggatggagactggctcgctcccactgtccctaaccccaagtgtgccgaagtctctggctgtggcccttggacccgccctctgatcaagaaccccgagtacaagggcaagtgggaggcccctctcatcgacaaccctgcctacaagggtgtctgggccccccgtaagatcaagaaccccgcctactttgaggataagactccatccaaccttgagcccatgggcgctattggcttcgaaatctggaccatgcagaatgatattctgttcgacaacctctacattggtcactccattgaggatgctgagaagctccgccaggagaccttcgatgtcaagttccccatcgaggaggctgaggaggaggcttctaagcccaagcccgaggtcaagcaagaggataccactgtcaccttccaggaggatcctgttgcctttgtccgccagaaggtcaaccacttcgttgatctggccaaggaggaccccatcaacgctgtcaagaccctccctgaggtggctggtggcctgggtgcgctcctcttgactatgatcctcatcattgtgggtgccattggtgctagcagccctgccgccccgaccgagaagaagggcaatcagcccgccggtgctcccaaggagaagaaggaagaggctgtcacctcctccgctgagactagcaagggcggtgccaccaagcgcaccacccgatcctcggccgagtaagtgcgatgattgaaaacaattatacgcagaaaagaattttacccacccagcgaagagatttgcatttagttaccgcagtgatccctttcttgttgtgtcttggccgatgtttttggggtgaaggtccatgaaacattgaatggaggcccgatttgtatactcctgattatctctattatttctactcggtattcactttatttctttcttggaaccgccttgccttttcacagtgtcatgactatgacttagccctctccgatataggagacgtaaagtaaagcttgaaatgggaaatgccttcctaaatcgctatgatcccttgcctacaacgtctagtacgcacccgaaaaagaatagatgcaatcgataactgccccccagttagtgtcggcgatataagagccaatttgcaactcctcattggctgaaaccgccgaaaagctaccttatctgggggttcacattacaacgtggggaatacccgtggaccgcccttgtgactaaggcggtttccctcgggcctgggggtcggggtagccatagatatatcattcccgaggtcctggcacccccagatcgtcttcatatttctctttctacttaatctgtgacttgtccttttctctaattctactgcttttacctctctataattcatcatggctgcttgtcggtcaattgcccgttccatccccaccgtccgcgcagttccccgcacggtgtcggtaactgccagagctgcttcttccagatctctcactacttcttccctcgccagtctggtctcccgcagagtagccgtcccctcttcatcactctctgccactcgccgcttgcacgcaacagcgcagcgactcgtccaagcaacaacctcggccgtctccactgctactgaatacccaacaagccacgaaaagattgccaacccaattgacactgctaacttcattgacaatgagtttgtgtcatctaaggcatctaaatggattgatcttcatgatcctgccaccaacaatctggtcacccgtgtcccccagagcacagatgcggagctaaaggccgctgtggagtcggccgagaaggccttccccgcttggagggctaccagcatcatggccagacagcagattatcttcaagtttaccaacctcatccgtacccactgggaccgattggctgcgtccattactctcgaacagggtaagacttttgccgacgccaggggtgatgttctccgtggccttcaggttgccgagaccgcctgtggtatcaccacccagatgaccggtgaagtcttggaggtggccaaggatatggagacaagaagctaccgcgagccactcggtgtcgtggccgctatctgccccttcagtaagttgcccaccactttcaatccctccacatggatgctaattgttaccaagacttccctgccatgattcccctttggtgtattccggtcgctaccgtgactggtaactgcttggtcatgaagccatccgagcgggaccctggtgccgcgatgatcctggcagagcttgccaaggaggccggtttcccaccgggtgtcattaacatcatccacggtgccgcccccactgtggacttcatccttgatgagcctgctatcaaggctatcagctttgttggcagcaaccgtgctggcgaatatatctacgctcgtggttctgctaatggcaagcgcgtgcaagccaatctgggtgctaagaaccatgccgccgtcctacctgacgccaacaagaaccaggctcttaacgccattgtcggtgctgcatttggtgctgctggccagcgctgtatggcactgagcacctgtgttatggttgctgagactaaggaatggctgcctgagattgccgagcgggccaaggccctgatcgtggacggtggcttcgaggagggtgctgacctcggccctgtgatcagccccgagagcaagaagcgtattgaggacttgattgctagcgccgaggaagagggtgcaaccattcttctggatggccgtgggttcaagcccaagaactaccccaacggtaactttgtaagtcttactacagatactcatatatgtatctcaaactaattgtgcctccgcaggttggcccaaccattattaccaatgtcacccccgatatgaagtgctacaaggaggagatcttcggtcctgttctcgtgtgcctcaacgccgagacccttgacgacgccattgacgtgatcaacgccaacgaatacggcaacggtgccgccatcttcacccgctccggctcgaccgcctccaagttccagaaggagtgcgaggctggccagctcggtatcaacgtgccaattcccgtccctcttcccatgttctctttcaccggtaacaagaagagtattgccggtggcggtgccaacactttctacggcaagcccggcttgcagttctacactcagcagaagactgtgaccagcctttggaagagcgaggatgcgatcagcaccaaggctaacgtggttatgcccactcactcataaatatggtatatgcctcttgctttcttgcttttcctttagccggtcattcgcatgaaaaaaatttgtcttttcttgttaggcaaaacatacgccttatggatcccaatgaatgtatctgaattatatgcttttatgtcacgaaattcatgagtatgcacatggattgcagattgaacagtgtatgcagaattacaatcgcatactcgcttatgcggccttgcaaagtcattttggtagtcttttcagatgtgtttttttagatatacgtattctccacttctttagttttctaggcagacagcagaaaaggggaaaagcttagttttgcgcaaacgacttttccatgaagaaacgatctataaggttatagcatgtctatgatcaaactcacacttccctagtacgtactaccattaaactcattggccaggttgaaagctatattgacctatggtctatagaaaactaagaaactgaaagccctagaaaatacaaggctatactcaacacacgagcaagagcaagaacaagaccatcttactcggcaaccttacgctccttgaaagcgtaaacaagtctagcagaagcaaccttcccatccttaacgacaacaacacgacgagtatggcgtctctcgccatcaacaatctcaaatccccaaacctgctcagcagtccacccagactcgacattctgcacaaagctctgcaaaaacacgccctcgccctcctcggccaagaatccctcactcttcgacccatcaatgagagtctcgccaatcaggaacttcagcaccttagcgtcagcctcaggcgagccggccttagtctggacctcgaggacagggcgcacagcaccatcctcgctcttagtgccggcgatctggcgcgagcggcccttcagcttgccgaagatgtggtcgacgtgctcgcgctcttcccagtccagtcggcgctcttccttggtgccttggatgccgcctgtgattacttgctgcgcgtcgacgtggatgagcgcggggttctcgctgtctgcgtactgggtgatgtagattgtcactgtcgcgtatgagagagtcttgcgaatgagccagcccactccttgctgtttggattgttagtggggttgagttgttggatggggtttatgtatggtatggtatatgtagggcaggggataataatgattgtggttatgctgtgatttggattatgtattgtatgattggagtatcgtgacagggaatattgtgacaggggttgtgaaactcttggctgttatattcgagtaacccggaaggccggaaggttagggcttggagtgcataccagagataggatagggtctgtcgggttagaatgggttgagtcctgtgatacatgagtatgttgttatatggcttgttttatttaagcataccatctcccattttccattcaggttctgcatagtaatatcagcaggggcggccatcttgaaggttgatgtatagtatccggttgatgcgggtatggcggggggaagtggtaagcaatgaaaggacaatttggtcagtagaagaaaaattcgaacttcaaggggtaaaaagaagaaaatagaggaacttccaatgtcacctaatatatagttgtcttggttaagcaatggtcttcaagcatgtgtttattctcgaatccgaggctagaagtcacatgatctgatgactgtacatgtgattaaggagagctcggtgtttacatacttcgagagctacaatccaatcatgtcgttcaataagaaatatgccggtcttcctgatctagtgagaattcttggctgatatccacggggcttctactgactgtgaccaaggacccatccccagatatctatgaaacccccgacttgaccgatgaagcatccaccttgcccgtgagttcgccaattccacaccaaagagacgtcggcgggcccagtcactgatcctatctagactactactatccgcacagactccgaccatgatgacgcaggctcaaactccgatatcgaccgcgagggtgtcaaccccgaccaggcgcgtttgcacttcatgggcgcggccgtggacgcccgcgacgtcaatttctcagatagcatctccatgaaacggcaggcctaccggagcaagagcatcagccgccgccgtcgacgcagacgcgaggacggggtggaggaggttggtgacctgagtgatagcgaggacgagtcgcttgaccggaggcttgcgcggctacggagagaggtcgaagatctcaaggtggaaatgaccaacaaaaccgacagcccagatgctgaagctgaaaacccaggagagaacctaggtgatggcgttgcggagctaagccgcgctctggataatctgcacgcctcgcgaggtgcagcgagctcatcgcactcggctgcggctttgctgtctcagaagcttaggcctgagactcgccctgctacagacgtaaggagacaatcctcgggggatacaccaagggcagtgcaggcgccaactgcctcttcggcagggatcctctctcacgcagcagcatttgacagccgcctagcgcttcttgaaagctccctcggtgtctccagtacttccaatccattcatcgccgacggcatcaacgactcaacgtcgcgatcagtcctcccagctctggaccaactcacctcccgcctgtcagcactcaccggacttctcgtcggcacaagcccagcagccacgacaccaggagtgcccaatgccgcgccaggaatgacaaccccacacctggaagctctctccacgcgagtgcgaaagctgaccaccgatgccgaggcgctcaccgcagcccgcagaaaagccttcgaggccgcaaaggccgtccacaacgcccgtctagcaacttccgacgccgacgtcgttcccgcactagaagcatcgaccgacgacgaccatgccgccaagatccaagccctctacaccaccctcccaaccatccagtccctgcaccccctgctcccgagtgtcctcgagcgtctgcgctctctgcgcgcctgccacgccggcgcagcccatgccgcggactcgctcaacgagctggaaaagcgccatgccgagatggcctcggagatcgagcagtggcgtgaaggtctgacgaccgtcgaagagaagatgcagcagggcgaagctgctctccgctccaacgtggaaactgtcgagccatgggtgcgcgacttggagtctcgtctggcacgtctggaaggtcccgcggcagtctaatccatttcttgtctactttttttgatctgctctgcctggggcagaggtttgatgaataatacccagtttgcatgtacgtcgaatgttgagggcatattgtagttatcttcaattgtcaatatcggttctataccagatggccttcttttttatatgaaagactactatagtgttactgtagacagactagactgtataccaccatactaaacattagatccctccctcacccgcctcaacacctgaaccctcggtctcatcttaacctcaacccaccacccacgcaacaaagcactcctcatatactcgcgcagaccctcaaacaaaccaacagcacgcacaccagcaacagcaccgataacacggcgctcagcagttcccgtagcaggagtcccaggcttcaagatcgagacccccgcaaacgaatctaccacaagcaccctctcccagtccgaagcagggagcgcacgccggagactgctctcatcagcatccatgaacccggcctgatcacccgcctcgacaacaacataatcgaacggctcccagaacccactagtggctttcacagtcttgtcttcggttttgtcgtatacccaccccgacgaagggtgttgttgcacgaagcgcgttacgcccgtttggcaggcgaggttacctaagtagacattgatcggcgcgctgctcttctcagaacgcaagcccgtatcgtggaggacagagtgttgataatgcatggcgtcgagagcctgcccaccggggtaatttgccgcagacgcaggaaggagcacgagatttgacagacagaaggtggcgagtgtcgtaatggccagggcgcgtgtcgccagtcgggcgaaaacagagcgcgagcggtgcgtccagagatatgcggcgccgagggctgctactgccgtcagggaggggatgatgtagacgatgaagcgccattccttgtgtggctggaagctgtacagggcgacgaaggaaagcgccgggatgagaagtgccagggcgggggagcgcgtggcgggttggcgtagtgcgacggggatggcgaggaggtaggagaggggattggagaggaggcgggggagggaatttaggaagtagaaggaccatggctcggtaccccattcggaggactggcctgctaggacgttgaagcggaaggcttcgaactccggccagagggggaagcgttgccagaaggtgctgtcgagatagatggtgagggcgagcccggtggtgaggcctactaggcccgcgatgatggtgtgttggaggttgatccgtcttgttgctagcaggaagagagtctgggttccgactaggagggctaactcggagcggaagactacgcctgccgtggtgaggagcgcgagtgctaagccgcatttcttttggtctgatgttggacgagggcctgggagaagcagaaacattgctagtgttgtgatgctgaaggcgaacatgtttgataatggccttgaggcatagaatatcaagtggaactggcttgcttggagtaggatataccagatggctgttagctggccgaagctatggcgcaggcctcttgcatatattgctagggaggaggcattgagtaggcccaggatagctcgagctggatgtcggtgttagtttgcttgatgtatcgcactattatctatgccgtacctaatatctgtcggttgatcccctcattcaacaagatcacaggcttcgaaagcatcgcgagcgccatagcgccaagagcgctccggggaacagccccggggaaagagaaatggtcatagtcggtgcgattgagattcaggtcattaaagccatttggcaacccgttggccaaaatatcatgtacggcctggacgtggaacgactcctcgactttggtgtatggagcgacgaggagatgaaggaggatcaaggctgggaagagaagagcgagaatcgcatatgctataagaaccgttagcttgttagcttgtgttgttgtacagagcgaacgaactatatcccatggtgactgcatccgaggagtgtaaatccggagatctggcgcctcccgcacttcacctttaacatcttccccaacccgcaaagatgtttttcttcttcggccttgggaagctgttttacggtatgtacttgttattccaactctccagcttatgctaataacccgccctccagtcatcgtcctcatcatcaatgccatcgccgtcctctccgaggaccgcttcctagctcgcggtacgtccctcccagctacagcccgtctagaagaataaaacctaatgaataccggaaacatacagtcggaatgggtcgcacacaacccgagccaggcttcggcgcaacatacgatagcacaagcgtgaaagccaagtccgtcgacctgatcgccagtgtgcggaccgtaatgcgcagtacgtttcccaaccccgcgaccatacaaccccggtcctttatctcgaatctgagtgacagctttcaacctgaataagtcgcaagctgttctactcgataaccgagacgccagccacggcccgatgggatagatacatagctaacacatccgcgcatccagtaccccttatcgtcatcaacacagtcatcattgtctacgagctggtccttggttaaatttcgctttttcgctatttcctccacgcgccgaatgtcgaactcccgcatccgtcgcaacccagctgcatagtgacccagctgccctgccaaatctacatcactgttcactacgacttgacttgcgctgtgacctcccctccgatgagctattcggaatccgacactatatcattaatgacaaagagtgaaatggggcatgatccatgcacgagcgaggagcataccgagggcagaggggtggtactgaaaaaccgctgccaggcgtctacttcatgctgcgctgggttaaggcgttgtttgagatgacaggaacggtggtggcgtgcagcgaatagcccgtcttcccctcgagttcgttttgattacttctggcttgtaactatatacccaaaatgctagaattgcaatggacactgatcgcgacatggtttacgtgaatatgtgtaggggattgtaatagggaaccccttggctaacggggcccccctctgcctggttctgccttattttgccttacacagaaggcatcaattcaattctgccagagtcaagtgactacacgtcggttgggccatttctttacagaacagcaatattacgcgtatatcagcgaaaaatttatacaaatcacggccctcttaaattgagactttgtgggagatattcaacccgcaatgacagactcatatttcttattctgatcacctcatctgtgagcgaatcaacgttgagtcaccgaaaagcgcctacaatttcatccctagaaatcatggactttttcttctactgttgtgatggtaaaactcattacttagtcatctgtgtctgcatagttaactaactagttaactaactaaataattaactaaagaagcaaataattcatttcatccggttcagcgcagctcctcccgcctagagcgcagatcctcttgcgtggacatttgaatgacgcgctatcttgtgcgcagtttgtcttcgcatagggagttggatagaggagtgtgaaggaggagaaggaggaggaggaggaggaggaggaggaggaggagaaagtggcagagtcggcgtgagctccagatgttccgttggatcagattatattgtttactagatcattgaatttctctcctctctaaatagttatatatgcacaaatttgtcatactggatccatgtgattgaacagacagttcacgactattcgaaagaatgaatacaatactgcatcctcgtttaggcatcctccaagttcaagttgcttattgctaatagttaggtgtctttcaaagtgaattgagttccatacggagtcgggaacggtattctaccaacgccgtgtgacggacttggcttagggctaagcttagcgttcggactatctaatccaccccatgtctaacacctaactcatattgacaaaagaaaaaaaggagaaaccaaagcaagcttcatctagatcaaatacccccgcaaaggcgctgtcaccttgtaatcatcttccagaccaaccactagactaatcactccgtctggcctcaccaaagccagtgcacccacgcggggatccacgcctaataaagcatgccctgaagcatgaggttcttcgtagattcggtacttccactgcggcagcggtgctggcaaggcgtctagattgacctcgtagcggctgttggtatgcaccagaaacaggtccacgatgcaattccggttctgcgggttagtgtagaagatatcctcgaagcctcaggtctgactggacgcaccaaaacacgagagggccgacttgggcgacgccaggtagtctgtcagtgggcccaaacgaccctcttggatcgccgatccaacaaatgcaaacaagtgaaagcgtccattggaggggggttcgttgagcaagttggccgctattccgtcaagatggcgatagagatccaccggatacagtcgcttgccgggggttaatggctcgactgcttggcagtcgaccacgaagggtgcttcgcagggccgtgtcaaaggtcctggctggtactggtgaccaactccagaggtgaagccctgtgccttcttgtatgtatcctggaattgcgtatcctcacggaaatccttgcgcgagaacagatgcgagaactgaacatcaaagtcaatcagctcctttgccatctgccgtcgctccagagcataagtctccatcaggtttgcgtgggccctcccctgcagcaccaatgccagcttccatgttaggttgaaagcatcggccacgctagtgttcagcccctgagcagccgaggtgctgtgtgtatggcacgcatctcccataatgaacacgcgctttccgtcccagaactagtccacgatgcgctgttgcaggcagtattggctgatttagaggatctgatcgatctccatagtagctgccggcaatatcacgcactttctgccgtagcagatcttccagagccacatcgctgtatctggtgtgaccattcatggggtgagccttggggccctcctcggccatctggcggagatcgtcctcattaagcagggtgtacaccccgtttgtatccaacgaattggggatcaacatcatgcgccccttggcggatccggcagatggtagcgtcgcggcactgcctggtcagacagccgcaaaacccaattatctgaatcaacggttcctatcgccggcgtagttctggaaagttgctgtccaattgcatatcagccacacaccagacctcgccctggcttccatgcttctcccattcaatacctagcagctaacgggtcttgctgccagccccgtcggcacccaagagatatttggtgcgaatagtagagaggacattcgaatatccgtgcttgacaagaacatgcagaggatactaggggtcatcttcgacgtaagtgaaattgatcagctccacaggtcgatccacttgataaccatgcgcctgtagctcttcatcaaaggcccgctctgtctctcgctgtggcacgctcaggatccatgggaagggagtcgtggtttgaacctcctggccaacataggtgcaatcgagctgaccgagatcgttgttggcccaaaaagccatcccactgacgtgtttacccaggatgtccaggtggtgatggatgtttagagtctgcaggacttcctgggtgcgaggttggatacctggctcgcgtatgtcaatgccggcttttcttgtttttcacgacaaaaataagtaaactcacctcccgcatgcccagtctggatgcgccgagaatgcacgtcaatcactcgaacatcgatgttgtagcgagccagcgtcagtgcagccatgaaggcgacagggccagaacatcgcatttgctatcggagaccataatgtggggttggtgatggcgaaacttggaagacaataagttgcgagggcccatcgatttgataaatataaagattggcaaggcttcctatattatcacaaccctcccaacggacattcggaactggacgttttcgggcggattgtccccgcggatgtccgacatctggaccttctgatgccgtatttttcgccccttgtccggtgactgtctatatttcagagattttgcgagtcgagcccttgataaatggacgcacggggcagccagagctccattgggaatcatcctcccctattcgcttgccagggcggtgttgttgaacattgagttgctttctctacgatccgatactggggacggactaagtagcaggcatggatttcgacatgtggatggattccaatttaaatactcgtggatctatatttgtaagtgtctgtagctaccaaacaacatttgaaagaacatttgaaggccacatgcatataatctccaagcactaggagaattcaaatactgcgaactaagtgtaaagtgcatcgtgtctaccttctctacacactggatctaccagtcagcttgatcacttggcctaatacattggggagaagttagcaaagtcatccatgggcggggagattgaaatcatggcgaacataccattaatccattccccctcttccgaggcctaaaaacacacaacccgagcaacatcgagtggttgagctctgcgtcccagcgggtacaggctggcgatacccttatcaatctgctccataggcataccaggataaccattgggggcgtagtaccacgagttctcgagatacatgtcggtcagaatacctccaagggccaccgcgttgacggtcatcttcttaggaccacagtcagcaagcgaagctgcgagtaaaaccttcgacggcggccttggagccagcataaagagcgtgattcttaacacctgtcatgttggccgctacggacgagatcaggatcagacggcccccctcagagccgtacttcagagcatgctgggcgatgaagaactgggcgcgtgtgttcagcgcaaaggccttgtcatacaggtcctctgtcacatcctcctccgcggagaaggcttccatccccgagttggacatgacgatatcgatcttgctaaagtgctccaatgtttttttcaaacaactgcgtcacctccgacggcttggtcacatctgcttggatggcgatagcgcgtgggctgccgggcaaagcctgaatggcttcgataacgccctgtgctggcccagcggcgtgagcatagttgaccacgacataatgcaccgtgtgaggcgagctctttggcgatggacgcgccaaggcctcgaccggcaccggtgatcagggcgactttgccgtggagatcgaaggatgcgggcatggttggtactgtcaatatgtgtttctagagatgaaagcaattttgtgggatcaatgttttgctcgacctccagatttccatacatataaacaattactactcaatatcgagcccatcttccctccgattagtgtctatatccccaccgaggaatccgcccctaaatgcgccatcttccttgtcggaaaacgagccaatcatatgacactacccgatctcgacgaagctgtcctactttccgatgtctatcttttctagctatcgaatgtgacgatctgggaaggatcgcacttgccaaaccggcaggaacgacctacaccctcgtaccctcgctccttccagaatcagcaacaggattaagcgaggaaattgcgacttttgcattgaatgcaaacacaaggtataaaaggggaggaacaagtgcacagtagtttttctcttttcccttcttcccttgtacttagaatttggtttgcattgcactctttcttctggatcgaattggcacgtaacatcgaagcctttattcgacgagactagggtactcggagaatgacttctcaagaagtaattcgcgagttggatctaccttatagcgaggtaacctttcgaacgtttttaaaggttcatggccttcgtcgttacgttgctaagcgaaaaagtttttaagtgaacggaaccgacggcgtcgcctttaatttaatctcgaccactgagattagaccttcgaagattggataaggtcttttagactaactaatgaaacctaggtttcttctagttgtcataagagaacatatattacccacgagcggtttgagaacgaatgtatacacaaagacaggcttaaacaagttgcctggatgttctggggatcgattttctgggagaagaattgggggacaataaacgcagactggtatcaagggcatatatgccctttaatcaggcgtttggttcgtggccggggtgagagctatgttatacaagacggagcgccgtctcataaagcccgagcaacaaaagcattacttcggttaatgggtgctgttttgctagattggccggcgtactcacctgatcgaaaccccattgaatctctatgggatctaatgaaggattgattccagcgtaactatccacgttacgagcggaatctggatactatacggcgtatagtccaacaagcgtgggatgctattccaaatgagagggtgagtgagggtcattgagactattcctcagcgtatgcaggacgttattgatgctgagggggggacactgagtggtagagagagagagagagagagtcctggaattagaaaattagaaaagaagaaaaagtactgtactcggttgttaaaaaacaagaaaattactagcgtaaaagcagttgttgacgatgaagatgtgataaaaatgacttaattttgttagtggtttccgtacaaactatattgtaggtatctatgttgtaatctaccattatcctggcctggtcacgtggtagctagctactctatagtgacttgcacctcttacacattcagctataccttttcaacaaaacaaaatattctcatgaccatggactcacagaaagatactacatccataggcagtgacagctctagggaaaaccacccaccgacaaaatcagcccagcaatcaccaacagataccgatgatgtggaccgagacaccgaaatctcattagaaaaaatcaaaagtgcagaccaggcactgagtgttatcgaagatagcggatttttcaaacagtcgctttattcgtttcttgtcttgacttccgtgactgaggaggtcggacacaacctacttcaacttctggatcaaaaacacccacacgtccgaaaaggcttcttccttcgcaaaaaagtacttaccctcaaaataccgagttttacccatgaggctccactcgcctggttcttcgatcagcttttacagtggaatttcaacggtcagcttacacaagttgaggtgcggcgcgtgagggtgatggcaagcccgcgagtaacggcgcaatttcctggctacgtcggcgatgagaaagagcctgatacatatatcactcccaggggcaaccccgcaactggtcatccaaccgtggtcatggaggttggcttcagccaaacctactcaagcctagtgcaggctgcgaaagtctggctagagggtgttggcccaactgtacgcaaggttatcctgatcaaattcttccggtgcaagagcggaatcgccggcacaatcgaactctggggccgggacaccacaggcaatgcgagaatggtctggagcaacaggatcttcccggttcgaggccccgtcgaacgacctatctacttgactcgagaagacatcttcgacggcgtggttgagccaggccgccagggcaccgatcgtcttgaccttgatctcacttctctccgcgacataatcgtcgagacggggttggatgccgtcgggctcattcctgcgccttgattttttttttttttttttttttttttttttttttttttttttttttttttttttttttttttttttttttttttttacgacatgctttcgcggaggtgttaggtgttagggagtaagtgggatatggtgatttgcagacctgtatcttgtattttttctcttattttttatccgcgccgatgaccggccttttaccatctttttaccatgcatggacgaccagaatgaacactgcatatacgcagaagtcaaaccaaaaaagagaaagattcgctcataacttgaaatgagatatgtaagaatagtttaaaacgcccaaatccgagagacccacgctcgccagcaaaagacaagacagcaagcagcaaacccaatacgcctcttttcgcaaacctgccaggtttcgatcctgtcagtgtagcttgtacatgatacaaggagcggcagtggtgaaaagcaatagcagcaagaaagaagaagaaaaaaatacagatcaaagagcaaagtacaatgggaagagcagaaaaggaaaggaaaggaaaagggatgttaaaaaaagaaccggatctgagatccaacagagtctagaaagacatggctgtggaaataccccggcggggatcgaggacctccacagaagaatggaagatggaggcgcagatcataagaacatgatagtacatccataaggaagctatgtgcagaagcaaaatttgcgctcatatgtgcaaggtgctaagatgatagggggtatctccgtgaaagtcgagctgaagacgtgagatgaaaaagaataagtgctgtctggaaacgaaaaaaaacactgattgtagttcatgccaccttcttgaaactgaaagatctccatcgaggggtatggccgggccgcgtgtggttggtgggttggtctttgaccaggtctttggctaggtctttggccaggggctccgaggtccggatgggttgtttgggttgcttagggtgggagatgggagggaaatgtctcggggaaacaggcgactggactggcggctctgtctcgagggatgcttctggcacggcttctgcaaggagcggcgctgtcgccatgtcagacatggagactcggggctctttctccttgctgagtcggtggctgaaacttcggctgcctcgtttcaaaaagccgaacccggtcgacttccttggtgatccattttcagcagcgaggtcggctgtgtcggctttgctggcctcgatggctcttctcaactcctctgcctctcgtcgctgcatttctcggttgtacatctcctgctctttctggcgatttctttcgttcttctccttctctttctctatcgcccgacgttctttccgtagttggtgatcactcttctttgggctcaatggggtggtttgttcgtcagggattggagggagaggcggttgaacggctcgcggcgaagctgcttggggctccgagggttcttctgggtaggtgtgcagttggggtgcggttgggattcggttgagaggagtgaagggggttgtgtgatcaggaggcacctgtgatgcactttgggcatgggcgagaggtggtgagaagggagacccattagccttgccggcctcgcttgtttcggctgccccggccatgggggcctgattctcttgcgcctgctcgcgcaggacagcctcgatagttgtctcttgatagaaaagaacataggcacatgcgagtccgggtcgatctccaaagaagttgcgcacgtaacttttgtcaactggttccacgagctcgtcgtcgaacagcagccagccacggtcttcggtcttgataatggcaacgtagtggccgtgatacggtcctccgccaatgtgcaccaccaccgcatacaattcgtaaagacggtctggatcctcggcatcgtccgtggtgttaaatagacgaagatggtagggatagacgacgcgatggaacagcttctgcagtcgctgcaagtcctctgtgtatttgaaacgcttcaaatgcaaagccagcacacgtggcaaacgtttgatcttcatccgcttttccgcttcttgcagtccgccgcagttgtcgcagtggaacttattccgctcacagagcatctcctcggccgagaactttctcagacaagaggtcacggacgaatgctgctcgagatccaccgataaatccaagaatacttcgtctcgctgcgacaccttttcacaggtgagacacttggtctcggacgtcagagtcccctcgaacagctcgtgaacccatctggtagtattgggcgatttcgaacccgtgctagatggcaccattcccaaggagtcggcacttgctgttggtggcagagccttgtcgatgaatgcctgcttcgtggcttccgtttccacattggcgacgacctcgttgaggagcaaattcaaaaactcatgcgcatcctggtgcatggcggtccggaacatctcgtgctcgcgacggagaatgtccaagaactgctgcgggcgaacgataccaatgcgtgcttggcttcctacgaccgattcgaagatgtccttgagcgaagtgaacaaggactccgacatcccataactggtcgcattgttcttggtttccaaaatcggcagggtctgaagtgccactttcttcttgtattccggcgactccttgtcctccggcttctggttgggatttgggggcacaccggcctggcgcgcggatggtggggacgaggccttttgtcgggcagccagcgcctcggcttcgaggtgggcatttgggttctggtaacgtaggttcttcgcgagggcagcctcgaggctgtccatgggtgtgcgttgtgggtagttgatgacggcttcgcggaagggcactgagtaatagagacattgcaggatggagttacagtaacaagtgtttccatactgaaagcgcggggggattgtggtcagtgccgttgcggtctcagcagactccggggaagtccgtgactcacattttccattccataaaacttgtcgctgccgtcgtcgcggatgggacccatgtcctgcagcctcttttccagaggggaaatctgcggtacctggaagtcttttttcacgggtggcgccgtggccggggggtttgaagcctgcgcaagtgaaagtcccagtcagtggcggtcccaatccgaatggtctcacggggaccgaagcatctgctgtgctaccaggttgagcgagcatggctgtgcggatgtatggtcactcaccccattcttggagcccttggagaagagcgccttcatgatggcttaatggtcggtcgcactctgcattgatgaggcacagtgtgtggggagtttagagatcacaattcgagatcggcatacgaagaagggggggggatgatggagaaggaaatgaagcgcgtccggggaaataaagtgattgtcgtttgatcacataaggtttctggggtccggtggaaatgagaggggcgggagaatgagagaaggcaccgagttacggggtaatgtgttaagggatattagggagaatagattagagatgtctgatccagcaagaccagagttaaagagaaagaaggcaagtaatgtgccaagtagcagagacaaggggagcactggaatggacccaatttattttattgtagtaacatacataagaaccagtaacatcataacaatacaatcacttcatctgcaaccgaatcgtccagaaaacacaactcatatcgcgacctaccccatccatcttagcctctctccacgtggagacctaaggcaggtactggtccaatcgccgaatttctgcctctagcaggtcctaagccggaatcgaagtctttaaagaggtacaacatcctctacggagtacggaggacaacctcaagtaaagaagaaacaccggatataccggagccccatcttatactcattggccacaacggtttcccccagcggagcagccctcctccccccacgtccatggatgagagactcctcgaccaagaactcctcggccgtgattggccaccagccaccgtcgctcacgggccatgtgtccgcccctcgcatggcgtcgccccaacagccaatggccgcctgtgtggtggggccacgaaaggtggcggtggacccggccccttccaaagttggattgttcccacggaatcttttcctgttccttacatgaaactcttttcgggggggaatcgtctagaccggaagcatcaacatctagattccattccgaggaataccttatgtcgaatgtgtccaggctaacgtcagcctatatcaatgggagtcggccccttgcgggggtccaataggcgcagcaataccaatccagtcattcctttggtaccacaccaacgcacgttcccgcgatggggcactctgttaatctggctaatctggcttcaacgtctgatcgaactcacatatgatctgcccacgccaatgggaggagcaattaaacgagcaccgacatacaatccgacggcactaagcctgtacagcacgtacatggcgggggtggcgacaattacctctttcaaggggctcaagaactaataataatataatgataaatcgcatgttcggccggcattaggagataggaaggctacggaggccgtagtgtatcagtctaatcaggcttgggctaaccagttacaacccggattaatatagttctgtcgcaaatgacgttatggactgtggagtagatcgattgagcgatttacctgcatgtcatagccctttcgacaatgtacaacacaacaatgtactatatacctaccgcatccaatatcaaattgtcacggtatgatgacatcggaatggacgtgccccaaagaggaaggagcataagccggaaggatttcgggtggcagcgtaatttgcagaggcagatccggggaagtccagaacttggctgtatacgcctcgacgcttaatatgtcttatgaccggtatgctttagagtctatatactagtaggcattggcaaggcagccaggtgatgtgagacatcagatcacagggacatttgatctcaaattcatacactccatagttatgtacatgccactattataccaaagagaccatcggataaacaaccccaaacagaataaaccggtgttatcacgtgatgaattgcgctctatatggcgtggttattgtatctttcacctatcatcgaccttagattacttcgagaaaaaactcagaaaggcaaaagacctggctcaattatgcagttatgcacttcaggttggacaaggggcaatcctcacctcggcggcgccagtgaggtctttgatatccttgaaaatatcaaatatacatgatgagttgattttgccctttcgtctgtcgccgcagttcaacatcccaaagacctctccgctgtgcgtataaacctgcaattgagagttgaagaagaatggaacggattgaaccaatccagtaggctcgtaagagaatggctacaagagaatatattagccatataataaatctccaatgaacagaatattatcttactcggttgccttcaaccttatcggctcgggacaatcttcatcaaggcccagtccatcatgatctcttgacctttcgcgttaatttgtgtccgattcaaatcgcttccagcaacaatatgtcccaagggtcattccaaataaaagcgtccacgattagtttcagacctgcaggactcctctcgaactctgcgcacctatcgacatgttagcagtgtccagcaatattcggtaataccacccacagattaaaatcgataagccacaggctgattgaccggcgagaaatgtcaaatcgatgtcctaggaagtaacttccattgtcgcgcatcgtcgtaaagggttggcgtagtgcttcaatgggcctgattggcgtagataatcccctataacgatagtgtggctagggcccagtctttgctcgaccaggtggtcttgccgggtattactctcagtcgcttcgtgaatttgcatgtaataaaggcgactgcgttgaagttgtgacgggaaactggcaaaccggtgacaaagtcaatgcatgacatccatacgtcctccttttgggttgcttccagcttcagaaatacttcggttttgtattcttcgatattatcatctatcgcggcgatagtatattggagacctctgaaagatggatgatcaactttcaatacctctggggcaatggtgttgagtgattccttgaatctgagggggctctattcccagcgcgaaagcgcggcctgcccaggtgtgctcctgtgatttgtaacatttgttgcgggcgctttccttctgggggccaaacggtgtggaagcaagttagactataggtgcgccattccgattcgttgggtaaccgtagctggataagaccacccaatgtggatgttccggtcgaattaccatggatacctatgctgacaccagggattccttcccgtccttcataaataggatatcaacgctagattcctgaaattgtaaaagtcaactccgaatgatctggcctgcggtatcaaaagacccggtggatgtcttgtcaacctccactattatagtcacagggttcagatgcctgtcggtattggtgccataccgccaacattcaataccagtccactcctggatattcagattcgccagaatagtatcgacaattgacctccatttggaatgaatggagtgggtctgttcaacggggaaacaatacagtccgtcgtaaaacttctcttcgataatctcaacagaggttccaggtaggaggggctccaaaccgtggtagatctgcttggcagcctgataccaaagatcaggttgcgggagatctggcatgaggacaagcagggttggaactggcataggttcagggtcaacctttgacgtgcggcccttcagaatgacattggagaattcgatctcgagatcatccaggacttttttttagcacgcacatggatctgcgctggatcgtgagtaaacgtgttctttgtcgtcgccgctgggagagaagttaaaattggcccacccgcacgatgagaagacttgagaaagccgctgtggtcaacatataaacctccaccaagtggagaggaagacgaggtagaagagaagctgagcgcgtgcgcactaccctactgaaggccgaagatacaactgaagattcagacattatgaatgtctagaggctgaagaaagcagatccgtaaggatacaagagtcgaggaactgtcaaagatgaagtaaagagttgaaggggtagagaagacttaaagagatacaaaaaatagtcaagaagagccagacaagaggtagacaagacagagagaagagagagaggaaaagtgcaaggtgaagtagaggagagtcaaggaagagacaaaggcaagagaggtccgaagcctaaacaggaaggagccttccaggtttacataattcacctgggctgccaccgagatcactagtatcaaattaattgaatgcaacccgtattgaatgctcgtgatggcttgattgtagaagttgaggtataagttgagatgctgcacctatcttcatctagatcaggtgatctctcaattcaactgcacctgtttggaaccgacgtgtccgggataaacccaatcgtttgtttcgcagcgttctttttttatgccgtccattcctgttccttcgcgctctgtacaacgagcaattgccaatcaattcggtcggtctccaatttctcgtctggctcattgcccgtccctgcagaatcgtcgagtcatcgcgaataaaaataatatccctgcccccaccatcccccaccaaataatttctccccgccgcactcgtcagttttcctcctcccatcgctccgccgaatcaagcacaatggggaaagaaaagggtaccaacttcaacctcaagaccccgaagggcaccaaggattggtccgggtccgatgccctcctccgagaccgcattttcaccaccatctcgaacgtcttcaagcgccacggcggtagcgcactggacacccccgtcttcgagctgcgcgagatcctggccggcaaatatggcgaggactcgaagctcatctacgatctgaaggaccagggtggcgagatctgctcgctgcgctacgacctgacagtgccgttcgcgcgctggctcgccatgaaccccgaggttcgcagcatcaagcgttaccacatcgccaaggtctaccgtcgtgaccagcccgccatcaacaagggccgcatgcgtgagttctaccagtgcgacttcgatatcgccggtactttcgacgccatggtgcccgatgccgagatcctgcgcatcgtcagcgaggtctttgaggagctgggctggagcggtcgctacaccatcaagctcaaccaccgcaagatcttagatggtgtctttgccgtctgtggtgtgcccgaggacaagctccggccgatctccagtgccgtcgataagttggacaagatgccgtgggcggacgtgcgtaaggaaatggtcgacgagaagggtcttgaccctgaggttgcggatcgtattgagaaatacgttatgaacaagggctcgcgggagctgctcgacactctcctggaggatgagaccctcaccgctaatgcctccgccaaggctggtctcgaggaaatggccttgatgatggactatctcaaggcatttaatgtactagacaaggtctccttcgacatgtctcttgcccgtggtctggactactacaccggtgtcatctacgaggttgtcaccgagggttcggccggtgtgcaggccgacgccccagaggcacaaaaggccgagaggtccggcaagaagagcaagtccaagcagcccaccgaggacgacgaccgatccaacgaccccaccctcggcgttggcagtgtcgcagcgggtggccgctacgataacctagtcggcatgttccagcccaaggcacagatcccctgtgtcggcatctcattcggtgtcgaccgtatcttctccatcaccaaggcacgtatcgagcgcgagcagaggactgatgcccttcgcagcagcgaggtcgacgcttacatcatggccttcggcggcaagggcttcggcggcttgttgaaggagcgcatggaaatctgccagaagctgtggagtgctggcatcaaggtagactttctatgaacattgattctgaacaaacactaacatcacttcaggctgagttctcctataaggtaaagcccaaacttccccagcagttcaaggccgccgaacaaggcgccatccccttcggcatcatcctcggcgaggacgagatggccgccggcaagtgccgcatcaaggagatgggtctgcctgaaggacaccccgagaaggagggtgtcgaggttgaaatcacctcgctgatttccgagctgcgggaccgtcttgcgaagaagaaccacggtcttgtctcatcgctggcgcagcagctgcagggcaccattgtttaggcgattaaacaattgggtctgcattttcatttcgtttttttctttagagcgtgtttttcagaggtttctctgttttccctactacgtagatctcttgcattgtcaggcttggagctcggcctatcaaaaaggactggggggttattgttgagaaaaaagaactatatttcagagatgggttgatgtctttaagaattaccaaatacccaattcattgcatttcccctgtgctttggtttgatacaggtttataatatggcacagcatacactatcagatcattcgagacgattcagcgtctcgaaaagacaaaggcacaacttagtataagaaatcttgcatataaaaggactagaagtacaatacacagagccatacatatacacaccacaacatcgaaactaatatccctccgcattcttcatcaagaacgacttaacaaaaggcaagcgatcaacgacgccgagtccaagactacgcgcccaagcaaccggcccttcaccaggaacattatacatcttatgcaggagatcgcaagcgccgccgatcttcgcattaggcaagtaccgctcagacgagtaccgctcaagagcaagcaaatcaccgatatccatgccatgcgagacagcatactggatcgtcttggagagcgacgcaacatccgcctggccgaggttcaggccctgaccagcgagggggtgaatgacgtgtgcggcgtcgccgacgagcgcaacgcgcggcgagacgtactgcgcggcgtgtcggaagcgcagcgggaaggaagcgactgttcctgtctgcacacctgttgctgggggagggacttgggctgggaggggggtgtgctggacgcgccaggcgagttcgtcttggtgggatggggtggaatcggaggaggaggattgcatgcccatcatgtaggtgaggtctgtcatgtcgagacggaaggcggcgttgaccatggcgaggaaggccggggtggggagggactttaggtaggctgcgtgctcgggggtcgttgaccagacgagggtggcgtggttgtttggcagcgggaggagggcgatggggccgccgagagcggggaggaagcgctggtaggctgtgcgcttggaggccgggaagggcgcggtggctggctcggcgagagcgagggttgcgacgatgccgtggcggccgtagtcccagccttgggtggggatgtcggcgaaggtgcggacggggctgttgataccgtctgcaccgacgaggaggcgggccgcgatgcgcttgggtggctctgtttccgcggcggggcctgtgggcttgacggtgacgatgggccaggctgagaggtcgggaccgtcgggtttgaggtctgagccgttctcgatggaggcgactgtcgagtttgagaagagggagaggttctcgtcacctgagtcggcgatgcggcggagcagggcgcgcaccaggttcgcgttctcggtcatggttgctacagtgcgcatgtcctcgaatggggatgtctccattgaccaatcgaatgatattcgggacccggtttggccgtcccagacctgcatgtcctggtattcctgcacgcgactaacatcgagcttatcgtaggcgccaatgctacgcaggaacgccacggtcgagggggtcaagctgctgcaccggttggagaactggttcggttcgaggtcccaggctttggctttgcggagatcttgggtctcaatgagggcgactttgagctttgaggtgataggtgatgctcctgtagtagcattgtatcagtatatgccctgcttatctgcgtatggtatacatacgaagtgcggccaatagccctaggcctgccggcccgcctccaacacaaaccacgtcatataggtcgggggaatccgatttagatgcaaattgccgccgaccggcggtaatgccatgccggcaggttgggcagacatacggccgaaggacagctctggagattggacgcatcgtgtttagtgattggaggttgaatcggatgatcgccctcaagatagacttgcagtgcaaacagtacaaacacctgcatacaaccccaggttatgtccacgctggttatggtaatgcttcttccttttttaatggctcttgataccatataaaagttcatttcatcgctattttacttcatctattgaatttacacgaatatatgaataaatgaagagttatgatggtattgcgggtatgaaacatagcgacagcaacaaatatgaactgctatatcagactcggtctggaaaatgaataaagcatgctgagacaaatacctaaatacctaaacgcttccgacagcagccgagtcagagtcatgttcaggctcagcttcgccttccatctctgctacgaaccgctcccacgtagaaagcacgccctgatagaactcgatgtgcgaatcggcaaaggagccaagtccgtctcggaactcgaccgccttgatacgttcgaaatccgcgacttcgcggatgacctcctcgtcaaacatctcggttgtggttttggcggactcgacctcgcgggtcaattcgtcaatacggagctcaagcttccgcacacgctcgcggcgggactgttcgtggtcaacgccgcgcatgtcctccattttagagcggatgaaagaggccggagaagaggtgagcggattagaggcgtagtaagcagctgggttggaagccagagaatcacgctcggtcaccgctttattgcggtaatcgaccaaggcctcgaaatcgagctgtttctgctcccgtgtcttcagcagggacttgagggacattatatacgattcggtatcgcgcagcgagcccaaatagttctggtcggtgtggtccttcagtccgcgcatcccgcgcgcggtctcttccactgaagctgcaaagacctgcagtggcatctcaacagcaggctctaacgggacaagtttgcggaactgcgtcgcgagctcggcatagtccgtctctaggtcggattcacgccgcgcaacccgtgccacgatcttctccacatgtgataggtcttcgtccagcttatcagccttctctcgcacctcgataaagcgccggtccggcttgtgcactttagagaaggcgttcacaaatgaatcagtaaagttatcaaagatcccagtggccgcgccatcggacccggtatttgttgatacccgtgttgaatgtaggcgcatatgcgcattccaatcgggcgattccaagaagatagtgagaagaggcgcccgccgaagcacaggatgaagcgtcaaacgtttcaaaaatcgatgcagcgaccaagctcgtcgcgttgtgaactccggtccaaaacgatctcctcgcacatactccatcttgtgtttgtcggggagcggcggcaccgcgcatgccgggtattcgcgatagagcgtcttgtataggaagtaaaagtcggtgaagcgccgtcgaaccgtaaaatcgggcttctggaatgatttgaagtcggtctatatatgtcagtcatagtcattttgaggatatacagatgtcgggaggtttaggcagcagttgcaccactccccgacaatgtatgcaaagaaaaaagcatacatgtgtggtaaccaggtacgagatatatgcgtcttttgtcccgtcattttctttgagcggagaatcaacctggcattcgagaacgccatcgccgatgcccgccaggtcgacggcgtcggctagcgggccggcctgaggctcttcttgggcggagctcattctccgcttgccattggtgtcgtgatgaggttcactgggttctccagaatctgtacctgcagttgtcggccgcgaggtatcgctgtctgggtcgtgcttccaagacacactgtcaaagtcgtcatgttgatccatcgtgggggtgtcggtcggccgtggtcaaccggctgatagttgttgaaaccccagtgatgccgataaatcaatatttgcaggaaatgtttgatcaaggagtgatagggactgaaagggctagagatgtggagtggagggggaggtggaggttggagctaagttcaatgatcgccgttccccaaggcggagttccagaagcggaacgtcatcatcgcaatgaatgtcaataagagttgcttgctgcttgctacttggtcctttcgctttcttatacttatattattattctaagattcatcgagattgcttcatctgatatttatttgtagtatacacaacacgcttttggattcctgtcaactggggatatacagacagacctaggatcccaacccgtctattcctaacgaacgatcctctcaattcaacaatcaagtcaacatagcaatcgacaacaccgaacaagatgcaaaatgactatcgacattatattaaggttttggtagatgggggccaccgtgagacgttccatctccattgtctttttccgggatattggccaacccatcgcgatacggctgatcatcatcatcatcactgaacatttcctcgtcactctccccagcaaatgcattatacagctcaccgccacgacgctgtgttcgaccagatgctccagtcatcggttgcatctcatcttcatcctcaatcatttcaaactcgtagtcatcgtgagcagtggtgcgacgacgcttgaccctctgcagctggaagtagacacccaatccaatgaagaaggtaacgatcatggccatggatgcataaatccaaatctgtgtacgcttcgaagcaccgaaagtgggaagccaagaggatatgtagcctgatccggcggacgaagcagagggcgtttcagcctcattgctagtagtactcgtgggcagcttcacatcttcaattggcgtggggtttgtggttgttggctttggctttggctttgcgttcacaggccggtcatgatggtcatccgggttaggagctggggtctttgttggggccgccgtaacactagtcgtggctacaggagcatcctcgtaaggatggtcgtcgtcgtggtcatcgggcagggggtggagctcttgtttagctccatcggcggcctcaccccacagattgagtcgccaatcaatgaatgcgccggtgaattcattgacattggagtctttcacgatgatggaccaatcgccaataggtgattcacccctaagaataaattagcaaagcgtatatcatggaattggcagcaacacataccaatgagcaacagacatgaaagtccaatcctcatacccaaccggcatgacatccttttcgcgggcaacactcagatagctgatgattccagcggggctgcgcagctcaacgctgatgtcgccgcggcgggtgtgattggcattcatagtcacagtgacatgttccaatttagcgaagttggcctctttcaattgatcagcagttaccgtatagtgactgagcagaccccgatcaccctgggggatctcttggtgcactcgcagccatggcgagttgaaccacgcttgaggcttcacgagatcccaagtcttagcaagctggaccatggtatatgtatcgacctttccgaaaccccagtcgtggctgaacttgcggccagagggcaggttctgccagctaccgtcgtcttcgctcacggggaccgccgtctccaccatcaagtactgtaaatcacgccaggtcagctccgggcgtgcactgagcgcgagcgccacgctgcctgcggccagcggaccagccgcagaggtgccaccatgtccagcggagcactctcttgcaccgacgtcggtagtgtgaatataagcaccggagccgctactgtatgcgaccacaagttgggccgagcatgactcggagtaaggcgggtgattcccttcccggtctatggcaccgactgtaatactgtagatactgttggtatacccatcgaagttgcagttgtccccgtaggacgcaccgttaccggcggcaaagacatagacagagcctttaccccctctgcccttttggataccgttgaccatggcgcgcttgatcaagattccaggcgcatccatagtagcaccatcgtcgataggcccccatgaacatgaatatatgtcattcttctggtaggcgtagttaatagccgccgcttcatcgacatcatcgataggcttggacaagatccgaatgccggctatcttgctatcgtacgcaacaccgactccacaaacgtcgttctttgccgccgcgatctcgccgcagcatcgagtaccatgcttatcgtcaagcagaagagggcggggttcggggaggccctcgttgaaatcccaggagccctctggaaggtagttaggcttgaggtcatagctatccatgtccagcccatcgtcgacaactgcagtggccacgcccttgccggttatcccctccaaccacagtcctgtcacattgagatcgtgtccgggctgttttgtgttgataagatgccattgttctttgaagatcgggtcagtgatccctagagttgacatggcatccttccggaaagcaacggcctgcgcatcttccctcttgtccagcgatttatatggtacggagaccggcggaagtcgtttctgcaatcgttgtctcgctggagcaatcttatgcgaccacaggatcttgtctaaggggtcatcacttgacccgattgcgccggagcgccgccggagctttcgcctggtccgtaaatcattcaacaaggtgtcaaactgaggggtctgttcccgcggtaatgaaaaagtgtggtggccatccagttggccaatctggccctcgtggcgtgcgcctaggatctgtgcgatgtgggaaggagaggtggtatcgtcgagctggagggcgaagaagtcgcgggtttcttgagagcgagggtgtaggttcgcggacaccgcaccagcaagacctagggtggcggtgatgccgctgacaatgcgcatgatgaggaatcaattgttttcgaggaaagggatcaagggcgggttatgaggttcgaggtatctagcgggtggttgccatggacagttccggaccgttgaatagcaacttgagagttgtggtaaggggtgtactccgtagggtggacagaaaggaaataagctttaacaagaccctatttccaaggttcacaatagttggtaagaggaggttgtaacagcaagacacaatgttccaggcgaaataggaggatcgtcagaggtcacccacgcgaagtcctattgagtctccggaacggtctattgagctcgacttagttgatttggacaagaagctttttctttattaactaccagagaacgttcggggcgttctaaggccacggtttccactctgttctccgtattgcgtgagatattattatttagttacttgtctagttcccagtggatgtccgggctctaatttagcttacgtataggcacagccttggcccgccaggcatacgtagatagctaactaacaacactatccttactccatactggaattcatgactcgattgcttgatatttggatgctacggggattacggtgtatttcatcaataattcatatcaactgcagcaatcgaatagctcaagtccttgcatgagcaacatagatctattggctttcctctttcactttaaatctactgccgccttatgctaggtataattgagtacgccctgcgatcacataatagcctgatcccggactgagatgtacccagttactagactcacttaaagcggcacctgaaataggataaaacagaacatcgaggtacttatgtctacatgtatggagtatatggatggatagatggattttatgtgaaatgatcatgttataactgtgaaacatcgattcccagtatccagatacttacgttctatatgttcgtactcgcaaataggtatgtgggtaaccatagtaccgagtccccataccaaatttaagaattatgcttaattctttatttccattctatggtatttcacttttgaatatctcatatttaccctaacgtcttggaatcccgcatgaatattgcttttccaaggatccaagccctcgataaagctttcgtatgacagtggccccgcgcgaaggctggggataaccagccaccgggttatcggatgtatagaccttgctggtttatttttggctggctggacttgattgaaatctttcacttcttttcatcacattctctgccatcccattgatacccctatcctagtgtttatccgccttatagacaggccaacttccctgtcaccgccgcgtggacctatacccccgcccaacttggtttgttgcctgcgaatcagctcgggccatggtgtggtgaccctgcgttaggcatcagatccagtcgcattgaatccgttccatctattccaagaaaaatttcgacaaaagtcaagtccggcaattttccctaaatctgttcgaattgccttcgggaccgacattagcgatattcgttgcagttgggtttgcaattgcacatacttggcgctctatctacgctttttccagtcatttccttgagtttgggcgcaaatacacgacatcatggctactatggcaatgcgtcaatcgcctgatatggcaaacggcagctctaacccccagatttccaatggagcgcaaagagctccagcaaggcgcaatcgtcaaaagactccttctgcggaaagctccgaatacgaggcggaatatgataacccgaagacggcccagaccagtgggagcgatggccttgcgccaggacagggagacaagtctttctcggccagggcccgaaaccagcccgaggcaaacctgaactatacaacccgcaagccgattcctccatcgacaccagagttatcagagaaatcgtccacaccgcgaggtctttccacagagccctatcacccagaacccagtgcaaaaatgcctgagatccaggtccagtcaccaccacctgcaccagttgtgtcttcgcccccgactcggtccaacaccacacgttcgatctccgccaatgactcgcggccagactgggcatcagagcgatcacctcttcaaaagttggaggtaaccttaactggaatcagcaaggaagagaagcgagcacgagtacaacaggcagaaatcaaagcccgagagcgacttgcgcgcaagaaagccgaacaagagaaagccgaattagcggcatcattagcacgcgaagcatcaacacaacgtgcgcagccagaaagcgaaccatcccccggcgcagccagacggaatgaacagagagatattccaattggggatcgaaaagaggacggcatgcgaaatggacacgcagctacaccaccacaacagcgacaaccaagcatagctgtgcgtcacaatcggacagtttcagcaaatccccaatatcaatataaccgccgccccgaagaaccccaatatacacgcgcagaagctgccatcccactctcagctaagataggcaatgtgcctaggcgatcagtcacagtgagcggacctgccgcgaaaccagcacctgccaacaatatcagccacagtcgatcgatgtctcaagcgggtcctcgacctatgaaggcttccggtgctctaagagcggagacaacagacgaaatgttaacaccacctcgtgcgcaagatagcgccgagtcgcaagtcaggcccaagaaacaatctaaacagtctgtgtctttcaatgtcccgccgcctacgcccccgccaatctttgaatggaggaatgcacagcctgctaggcttgcggcccttgacttcgatatccagaattttgatgtggagcgcagcaaagcgtggtgggcaggtgccagtaacgaagatcgtagaaagagcagggctcttcctaagaactacaaatctcctgctcagaagctgacaggtaaggtcctccgttttctagttttcaagctagattttttgtcaccgaaatgcatttactaacgcccactaggaatgactgagcacaaaaatttccaaccccagctattcttgcgatgtggacctttgctacgatacacaggtatccagcgagctaggcttgatagagccagcggccccattgaaaaggatatatggcgaggatctatcatgatagtgactaaagattcccgctcctcctacgacactccacccacactgagactattctctcaaccgatggatcttcttcctcctccacccgtggagatcagccatgaagatggaatgcaactggctcctgaatatgtcgacccaacagctgggctcatgaaagtcggccgtgatgggcggcccctttacgtgagaccagtggaacatgtcgaggaacaagtcgacctatcgtttgtagagaacgacgatggcatctacgagctctcacctagcatggtcgactatactagtgaaggcatcaaacagcctatgacttccactcggatgccttccgtcgacggtgagatggcgagtttgtaccgagacattcctggagcccgtctgtacgccgatgccgcaagagatgtaacgttctggcgattcaacctagaggttgaactgagcacaacgcaacagcgaatcgcctatcggatcaaccagggacccgccctgggattctgggtgcccccagctggagaatccatgaacattatgtttcacagcggcaacgggttcagcccctctgtggactctgatcgagtctgcgggcccgatccgctttggcgagatattctcaatgagcatcagactcgtccgttccatgtaatgatcggtggaggcgatcaaatcttcaacgactcgggtatcacagagtcgccgttcttccaagaatggcttaggatgaaaaacgcagccgagagatatggggcgtcattcactcgcgagttccgagctgaattagagcagttctatctcgaccactatgctgcatggttctctcagggcctcttctcgttggcgaactctcaaatccccatggtcaacatgtggaatgatcatgaaatatttgaaggctttggttcttaccacgatgatttcatgcggacttctgttatctctggaattggaaagattgctttcaagtattacctgctgttccagcaccacagtgtccccgatgaaattgaggcagatgaacccagctggcttcttggtgctcatcctggtccatatattgagcagaaaagccggaacctgtttatgtctcttggtcaaggggtttcattgttgggtcttgactgccgcactgaacgacgggtatgttactccaatcttccgacttatggactatgctgacatgttgcagagcaatgaggttctcagcgaagagacctgtgatttattatgggaccgctgccacagggagatcatgaatggagagacaaaacatttgatcgttctttcaagtgtccctgttgcttacccccgagtggtatgtattctgattgcttctgtctttgatcgaacctaaaactaacgtcgaacccaggcaatgctccgcaatttcatgaacagccgcaagtcacttggcaaggctggagtacttggcgggcttgtcaatcgatctggcccaaatgtggaggtctttgatgaccattgggctggcaagcacctcaagtctgaacgcacatggttgattgaggatctccaggatctggccgcagagaaatcagtccggatcacaatactcaggtaagaccagaaaagtcgcttaacggcaacccaaattctaaacgataaaaactaacgaaatccttcagtggtgatgtccatctcgctgcaatcgggcagttctattcgaatcccaaattgaatatcgccaaagaccacgattaccgatacatgccgaatgtcatttcatctgctattgcagacattccggagaccgatcttattgcggatatgatcaacaagcggagtacgctccaccacatggactcgaacaccgacgaggatgtcgtccccatctttttccaggatgtgaatggcaaggctcgaaacaacaaacgattactacctcggcgaaactggtgttcgatccgtgagtataagcccggatctactccacctgatacacctgagtcagagataatagaggccccggaacctcggccaaataagctgcagcggacgttgtcgctgggtcgtggagaccagggatctaccgggaagcctggtattctcaggcgcctttccacccgtggaccacctcctacgaggactatgagcttcaatcgtggcgatgaagctactttcaatcgacgtgcaagcttggatgggcctactcagccccacgagaacggagacagctatttcccagggaccggagccgcgccacctccacgacccggcagcttccaccggcgaccaacaaatctcagccaaaaagcggcaaggaaagcggcgaagatgggagataacggcgcaggcgcctacatcaacctcgagggcgggctcgccatcactttgaacctcgagatcagtccacaagacccatctggggtcaccgcaccctacaaactgctcgtcccagcactacactacaacggaaccgagtacgacccgcccccagcgcagattgtcaagggctggagaaagttcctaccccgccgcaaaaagaacggggaagcaggtggacggcccgaagcagatgattacagtgacgacgaacaagacgactacgaggactacgaccttatcaataatacccgcgctaacgctgccactagccaacaacatcaaccacagtacgagggatatcctgggagtgaagaggaggatggagattctgagggcgaagtccctcaacgtccaccacggcaggttatggctgaacaatcccccagtcctgaggagcatagccgtccgcgaaagaagaagtggttcggcgtaatctaatgtactatattgataccattgtgttcttgatgttggctgtgacattttctttttgcgatctgatgattctatggatttctatgagtacgatagtattttttgtttgatgtatgattcccctaatgcagcgaggttcaaactgatatgtgatgttcattctatcaagacattccgagtaaagctgaagtatacaaaaatcgtcggctctccggtgtcttattaagcgattcgggccggggtgatctgacgggattacatcagcggtctcgacctctcacgtgatatgtgcttagaaagccccggacgatgttcaacagactcagccctgatttgcctcggaattgctcgaaatcgccttaaatcgcctagtttaaacgaattatctctaatctcgggtggtctggaaaccccagaaaggcacagaatccaatcgcatcctgtctgaggacccagtctctctgatctcattgtcggtttatcaatcaacttcatcacctaatcctggtctccactgcccctccgaaaaaagacattatatctccccctcctgtccccttcccctccacttcccatacacaccttcaagctgttttcctccgcctttcgtcgttttccctcccttcgatccattggattgactgccgctgcggccactaccgtccaccaacagtctcctccttcggcctcggtcttcactaagtcgtttccgacgccgttgcgcgtcaatcctaacaccgccagaatggtgcactctaaagtagtcagtaagtagtctttggagtggatcgaatggtcctgatcatcttaatccctctgataccagagttctaacctcatatcccccacagttatcggctccggccctggtgctcacactgccgctatctatctttcacgcgcagagctccagccagtcctctacgagggcatgctcgccaacggcactgccgccggtggtcagctcacgaccaccactgacgtcgagaacttccccggattccccaacggcatcggcggcgccgagctgatggacaacatgcgcgcgcagtccgagcgcttcggcaccgagatcatcaccgagaccatctccaagcttgacctctcctcccggcccttcaagatgtggaccgagtggaacgacgacgagggcagcgagcccgtccgcaccgccgacgccgtcatcattgccacaggcgccaacgcccgccgtctgaacctccccggcgaggagaccttctggcagaacggagtcagtgcctgtgccgtctgcgacggcgccgtgcccattttccgcaacaagcccctctacgtcattggcggtggtgactccgccgccgaggaggctatgttcctggccaagtacggcagcagcgtgaccgttctcgttcgcagggacaagctgcgtgcctccaaggtcatggccgaccgtctccttgcccaccccaagtgcaaggtccgcttcaactccgtcgccactgagattatcggtgaggacaagcctaatggtctcatgacccacctccgagtcaaggacgttgtctccaacaaggaggaggttgttgatgccaacggtctcttctacgctgttggtcacgatcccgccaacgccctcgtcaagggccaggttgagctcgatgacgagggttatatcatcaccaagcccggcaccagcttcaccaacatcgagggtgtcttcgcctgcggtgatgttcaggataagcgttaccgccaggctatcaccagtgccggtatgttcagaccccggttcgtccattataagtttatctcgctaactcaattttctacaggatctggctgtgtcgccgccctagaggccgagaagttcctctctgagactgagtctctcgaggacgcaaagcccgtgctctaaatacatatatacacctcttcccacaccttcctctcccatttctcgttgtcatgatacatgaacacatgatgtttggcccgtgtatcgagcactcttcttgcttctagacttatattttaggcgatatctcatttctaaattccccgtgcatatttcgattgggttccttgcgtctttttctctctttcttgttccctttctgttgcccacgtctcatggaagaggaaaccaagtggtctttgtggttttacatcagttggtctgcttaggctgcttatacccttagaaatagaatagaagaaaagcgaggctcctatgtcatcctcgataaaaagaactcagaagggaatttcgttccttcccatcatacaagccttattaggaactctattcccatgcaccgggtagtctataagttacgagtttggaagctcttttatcagattctcttaaatgtctagataagcaagatcatttgaattaaaactgccgaattaaaactgccgtttatgatatgtatcaatatggctgaaacgatactcatcacaaaagtctctccagagacaaattaccctcttcccttaaccgccgtctacgcagataacccacctaacgccgtaaaaaacgaatgagtcctcatttctcagacttcacaggcacagcagctgtgaatgcagtagcaagcacaggcaccgatgactcattttcagcaaggtagtccggcataacccaatcagcaaacggattctccgcgcaccagcgatccttgacgacaaaggtctttcgctcccactcggcaatgtcgaccttccacttatcccacgcctcggcattagctcggcggttaacctccgtctggtcgaggtagggctttttatcggctggcgttgcagtgcgccacatctggcctagcgcagcgcggatttcgtcgcgcggagccttggcgttggggttgttggatgctgcgcggcggacttcgtcgcattggtcgcggcagcgcgcccagtagtccttttggtagaagaggaaagggtttaggcctgattttgcggggcgtggtggtgcggaaccgagctcggcgtagatggttgtccagagggcttggtcgtaggcgtcgcggcgggacttttcggttgaggttggtttgcgggaggtggaggttgaggggggctttggtgggttgatggttgggcttgaggtggaggagagggatgagctgcctcttgttcttttcttgatggttgagccgtttggcgtggaggatttgcttcgggttacttttgacttttccgggacaagtgggtgaggcattgtgatggggccggatatcggctcgattatttctgatgctgcgcgaaggcctgagaggtatgctccgtggacggttgctgggtgagtgccgcaggtggcttcaccggcgaaatggaggtttccgattggccgggccatcaggtcgtagtcgtctgggaaggctgctgcggccacgtaggagtagctgccatatgtgaatgggtcctggccccaacgggtgatgatggtctctagaggaccgggaactttagtgtctttgaagacgtttcgaagttggccagtgacctccgtaattatttcttcgtctgatgtagattctgcttggtgggctgcgtcaccagccatgagggcaattaagcatgggagtccggtagtcttcatgacattccagaacagatagaatcgaccgcggtttgccgcgtaatcttcttgaaccatagaagcagcgttattcggctcacggagtaggccaaacatatctcgcttggtgtcccagaacggctcttcgaacactaaaatgaccttgttcattattccgaaccccagtcggtcaattgcgccacgcttccagtccggaagaggaggctcgaacttgattttctgctgcttcaggacaccgagggaaccggtgaaaacgacatgatctgccaggaacttttctccaccctcgcactggacaactgccttctgtttcttgttggacccagtcgtatcgtaagagatctcggtcacaatcttgccggtacggacatcgagcttttctggcagcatatacagcccgtagggtaattgctggtagccaccaatgacctgggaatgttcaccctcgaactcgtttccgatgtcctggtcccatcccgacaggctaagtctgttcacgttggatgcattcgcgtactcgagattggcgaaatgccaattcatcaaccgcatatccttggttgtcaccggaagcatgttttgatattgtttgacaccctcgtccataactgcaccgagagtctgcgcctgggatgccatggcaatctcgtccagttcaatggtgtcattgactgtgtatcctgggttaagcttccatccagttgcctggcaggtcaaggctgccgggtcatcttccgaatttcccgctagatcgctcgccacatcgacggatggttcattttcggcagtcttgtgctttattccccgtctaactcgctttgtggggaccaataaatctattgtcccagctgccctcgcctcttcatactgtcgcacagtaagtccgtcatccaccgctgattcgcggccagtgtcaatcaactcgcggtttccctgggcggttggcacaatctgagctttgtgacgatagaatccggttcggtcgagcaaatcattgtacagcttttctgccatcgcgtcctgaacctcattcacgggcgatccatcgatatcgtaaatcgtcgaaacatcccgtatcttgtgatagtgaagtgccagctggccacgaactatctggtctagcgggttgccatgatcgaagccgacaatgatctgagcacccatttctgcctttgggacaagcccatcaggcagggtttccgacttgagactgtgcaacgggtgtgaataaatgcgtccaccgactcttcgacgtccctcgagaacaacgactcggggcatggcatttgaatcacggtactggcggaaaagactctccagttgacgtgcacaccccagaccagccattccagcaccgattacaacaattgtaggtccttcttttcgtcttccgcgtttgggtttcactggggccaatggagcctccacgcagccgtgattgatgtagccatttcgcgcgagccagtcgtaagcaaacgaagccagattcatccatcggtaatctttggcacatccgagtgcttcttccctgctgacagctaccatgggatttctcccccagagaagcagtattccatttcgtatgttgaggtagattgtgacgtgaacgtggcaaagatggtcttgcagaaattcttgttcttgtcgatgaagagcatacgggttcagccgtgatgcatacgccgctccaacacactgctcgccgtaaacagaggggtgaattttagatgggatggacgatctcggtcgacatttggacagatcaactttcccactctccaaaacattcggtccaaagacaactgaaggcatagaaagagactgtacgggcttgggtggaggtgatgtagatgcttttagctcaaaggaagatgtcaagtcagttgaggttgtcgactcattcggagtaccgctactgccactggcatacagtctctccgttgtgccaacaatgtgggatccatcagacaggaagctatgcgacttggcgttgttgttccctagatttcccaaggcaattgatgccgaagccgcttcatatgccttgtgcgtgatgcgtagtcgcttcgcaggaggttcagatatttcggtcggttcagatagaagatttccttgaccttgtaacgtgatctcgtgatttggaacatattgattcatgtatgaatcttgacctgggggaattccggcctggaatctcatggacgttgcgccatacatgttgatagcgagtatctgcagacaaatcctcaaaggagggtgttgatgatgatagaaaaagaaaagaaagacacttccacgtgcaagaagacgtagttatggactcgaagatgtgatgtcgacagtccttctaccccgagagtgtgtggatatcaaatatgcaggcgttcgcccatgacatggtcataggaattcgagctgtggcaagccgaaggaacacagtctgaatgaatggatcaactgtattatgttagatgagatgtgatatggttcaaaatgaccagggtatgagagagtagaccgaggcagcacggatatcaggacatacatcgagttcatcccccacaaaaaaccctcccaaagaattgagaataaggcccatcaaacagggcacgaatattgttttggaacaaactaaacgaattgtaattgtaattggattgcgaaacttgaggaagagacagtgagaggaccagagtagaaaaacccttgtggcttgattcctcggagcggggcgtatttctcagtccggcaggttgcggcacccaagttcgtcaacgtccaagggctgcgctctctatgttcttcactttaggatcaatccaggggctacttgattttcatttggttatctaggtttcaacatgagtgtgcagaccataggcaccatcctcccctgcgaacccgtccgagtcattatcggtgaactcatcgtgatatgatctcctgttcgagttttcccagcccggctggtcattgtcactgtcgtcacccaaaatcaggtcaacattgtcgtcgtccagatcagtgaatcccattcgctcttcttcgtctctcgcaattgtgagagaggctttgtttacatcaggatcttctgaaaacccatgatgagggcggtgcgctgcatgatcagcttgaagcgaatctcggatatctgcacgctcttgggcttcgagctcctttgcgcgggccaaagttctaaaaaatagagaagagaaggatcagcatgagtgcacaaaatatttacgaccgatgaatttggggctcaaacctttggtatatataccacccggtgaagattccaataccgattgtaaggataatactgcagatattcacggccttggatcccgcactcatctcctcgcccttttcggagagcagacgtatccgactaccgatgaacgcaggaaccaacaatttgggagagatgatggctgtggcaagtccgtacatcaacggctgcaccgtaggaaatgtggacacagctccgttgcagatcgagtagggcagcgggcataaacggatcatacaaagaagtttgaggccatcatatttcaatgtcagggccaatgcggcgaatcgcttgtcatgttccataagacgtttgacgaatccagacagaattgtccgcgaaacataaaacgagacagtcgagccaagaattgttgcggaagcgtaaatcaaccatctatagaagaaatctcgagttagcaatatattcacttttttttttgataagagcaacatgaatcagtctcttaccctttccatataccaaatataaaaccagccacagtcccaaatgttgaccaacccacaagaggtggaaatgagacaaaaaagacacatagccacaggatcaaggcggcgagccaggatgtttcccacgtctcagcgaccgggccaagccagatgaacagcttccccgttaacaccaagaacgcgatcccggatagacccaggaatatagcagcgaagcaagccccgatttttttccatagactcatcccctcccatatcttattcatacggacatataactctgtgccgcgctggattatctgttcgcgatagcttgcaccctgcccgctcgatctgccggtgtttagcctaccggcgcgactccagggcggatgaacatcactatcaggagaagaaggtatagggatcgggggagatggtgagagagatagcgccctggcggtggacaggtagtccgcgggcattgtgaaatgtataatcctggggtatcaatgctcggcagaggatggtcgaatccggggaagatgaaccactgtaaaacagggaccgacaggaagtgcgataccagggtcgatagaatatccaaagaagtttcaagggcgtgtcaaggccctgatagttggaccggacatggaggatgagccaagcacttttaggctgaaaatcaatttgactctgtcagcggatcccgccggacttgagctcgggtggtgattgatctacatgttgtctatgttgtagggctatcgttcagttattttgtgctatttatactataagatacatatctaactctattttgtagttatgtctttgtatctatctatgtccatatcagggattgttgattctgtaagagtgtagttagcccctaggtatgtgaagcttgttattttatctacctatctctgtaatgctatatttcctttagcactcacatatcttatccttactatattattgtgttgttatattacccaaacaggccgactggaggtagttggagctaagtcgataagctgttgtgccccagtgttgatctccttctccgcctcccccctctttgtcacttcaccctttattcaactctcattcacaaacgtcggtcggcggcgatgcgatgtaattatctgcttgtcatctatcactctcgcaactctcatcaccttgagctataaccttgaaatcaaccttggaacccctgttgttcttcactttcttttcccatcacctggcatagacagaaagcatgaggtacctctgattctcgactcgtcttactttcgtcaagcatattcgtgcctatacctctaggcttcggacatccttttaagacccaatcccttcaacgctaaggtgttttcccgcttatcccggtccctttcctctacacgtattacacatatcggaatacaccatggtttccgacgagcttcttgaagaatgcctccagatcctgcaggatcaggcactggatgaggaggaacaggtggagaaggtggaggacttcttgcgtgccaatacatcattggcagggacacccttggagaatgcggtgctggacatcctctggcgccatcgcaatcgaaacttgccagacgcatcacctccagtccgtcatactgtgattcgccgctcatcgcctgcgccatggcagatggctcgatcatctacaccgctatcccctcattcaactttggggacaagccctggaagtacctcgtggatgcaaagctcccgtgggccgttctcgcggcctccgctatcttctactgcctccccatttgggtctccacgcccatcgccccggctcgcccttgcacaacctatccctcattccccaaatctgaatgcctacgagttctcggaccaaagccagatctctgactactatggagaccttgggggcgataacaatgttgactggctagtcgcagatgatgccaacagtacaacctcatccacgggtggtgtcagcactcccggggcactcagcgccactgcagttgaatttgttccggatatgagcccacatgatatcctgcgcacggtgctgggtgacaagcgatcaaacgatgaaatagaagctgcactggaggctaacagttatgatctcggtgccaccatcgcttcgttctcgcaggatatagaatccgaggcgatctcaaagcaacacgatgacggtcgtgtcttggttggcaagtctatgacaatagaacaaatacgcccggtcacaccattgggtagcagtcgcagccccgtggtctgtaagtactggctatccacgggacaatgccttcgagcggattgccgtttcagccatgacctaaacacacatgtgtgcaagtgagtgttttttgaaatctgggtaagtcaatcgttctagcgctaactattgtgaacaggtactgggttatgggaaattgtctagctggcgatggatgtcccttctcgcacgatccttcggcgcttatcggaaatctcagtgtcacggatagtagtcgaccagcttcgccctccccgttccaggtagacagtggttctgacgcattcccacccctgcaagtggcagataacggtgatcaatgggcaaatcaatacacgggccgataccctggccatctttctgcttatcaacccagcaaatatgcgcctcctggcctccatcctggaatgggcaaaagaagtggaagtgcaactcatctcggacgccccagctcccgtccatcaagccgtcaccagaatcgggagttgaatcctgctgcaccgtctgtagacgatccagatgccttcccaactcttgccgcagtcaatgctaagaatgctgggaaaaagcatcatgggaaacggggcggccataacaaccgcgaaactggctcaggaaaagaaaataccccttcgtctctggcggatgtggttcgaatgaccccatctcctgtccccgggaaaaccaaatctggctccagaaacaaagatacgaagggtcgcgagaacagtgccgcagctcagtcgattccacccccgcaaaatattccgtggttagagacaggctcgcgggcgaatcaacaatatatcaaatatcggacagaggctattcgccacggtactgtgcgaaacaagttcctccagaggtaagctttcagcgagtaatatgatccccactccttctaacgatatatctcccagcgctgcccaagcatggaaccgcaacgatgcccgagctgccaaagcattgtcgttacgcggtcaggccgagaacgacgcgatgcgcaggtgtcatcgggaggctgcacgccagctctacgaagaacgtaatcagcatctctctcacaagggattggatgaatcctcagaagagctttacgttgaccttcacggtctccacccagaagaggctatcgaatatctcgagaagatcctgctcaagcatgctcgagaaggcctccgggtggtgtatgccatcacaggcactggtcaccactcgaagaacggcaaagataaaatcggcaaggccgttaaagcatggctgaacgagtggcggtacttgtttcgggaattcagtgtacctggtgagcgaggaggttatgtcggagggattctcggcatcgatccaaccagttatgacaagtcagtagccaaggagctggctagcgaattgatggaggccaacgctggcggagagcctcccatcctaaccctgggcaaaatccagttactcaagcgcgaagaaatagagactcaagatcaatgacctggcgtgtcattcaactcaagataccccagtaccaatctatctattgaatctaagttgtatagaaaagtcgtctgcacaaattgagccttttcgcccaaatttgtgactcaaccacaagacgcagcagatgcatcaagcgaacacgtcgggttcttcaagcaatatttttaggacagattcttcctggctgcatgcttctatatactagcaaggctacggaatacaatacacagtagaaaaaggctcttctccagtagatgcactcatataacatactagaaggtacaaggaacatgcaaggatatatgcctagataatacacagcgctacatatataaatcatctactctggttcctgatgctgccactccttcctcaaagcatcaacatcaaccccacaagcctcagcctttttgacaatagccctagccttattggcaacaggaacatcaatcatcttcccatcaagagtccaagcacccctccccgccctcgcagccttatcatccgcaataacaacccgcatagcccactcagtctcatgcggatctggcccaaagatctgatccgcaaccttcacttgcgaaggatgaatacactgcttcccattgaaccccaaccggcgcccatccagacactcttcctgtagcacagctggcggcgacccatcccccttctcagacctgtacgccgtgcagacaaggtcaatcgttgacggtagctccgccgcccgcgcagcggtggctatcgcacatcgcgcgaacagaaactctgtgagcgagggcgtccgcgtgatgctcaggtctagggcgaagtcttcggctgcgaagattaagccttggagcaagggcgaagcagtgcagatctgggataggtttgtcagggacttggcggactcgactagagccaggagtgagattggggttcttgttccttctgttggtggttgctgggatagagtgtgggttatgacgtctgtgacgaatgttaggtcggaggcagagttgacttttgggattacgattgttgttaggtttggtgattggagctgggacggttagcaagttgaatgttaccagggtggtggaagggggtgggagctatgtgtgtgtgtgtgtgtgtgttctggagtccactcacgacttcggtcaaatcacccaatgcgagtccgctgtctacggaattgattcgcacggcgcgttcccggattcctggtggcgcggcttggtcaattgctctccgcactagcgagcgcgcctctgctttcatgtgcggagtcacgctgtcttccaggtcgtaggtgacgcagtcggcggtcagtgagcgcgacttatctagaaagcgttgggaggagccggggactgttgggcgttgttggttagctctggggtttttcttttggagttcggggtgaaatgcggggaagacctcgggatgcgatgcggctttggaagagagctcgagcttaccgtagaggagggaacgacgcagagtatttcgggctgccattgtcgatatggtgatttgtgtgtgtatccaatgatatagagttgtgtactgttattcttggagagtggaggttgaggtctttatggggttgactcgggaagaagccgactcggttatccgtaaagccgctttgggagaaggttagcaaagttgttttctccttatatttctttttcatgacctgatacaacttatgagatgtctggtagtagctcttcttactatgctaacaagcagttcatttaaatcagagaactcaggcataagtactctgtagcgaagctcgatttagatatatatacttgcaagtaaacgtattttctgtatattccagatttcaacttcgtgtcattaggtgtccaagtcccattcatctagcgctgtatttctagagtatatcgcaggcagcatccaacaaacatataacgctagtattacacaaatgtgctgaacatcagaggtactctagaaaaaggagtctggagcggatgcacacaacaaagatcaattcacctttgaagaataccatattaaggaggaggaacatattgtaggtgagatcaaagagtcactagtgagtgccaccaaaacataattatagtaaaatgttttcctaactctcgcctataataaggtaatctagatggtacttgaatcacccgaaaactactacatacatacttatgtacttcatactctgcatgtatgggtattgctatgtgccttttgaactactttggcctccttgtgattttgatgcagaggttctatactccgtatagatcagtgtcttatcggtttagcgccacatacgttggacataacgtgtggctgactggtatccactcagcatagtcacgtgaatacctttagaaattgtcccgaagcaggagtaatgatcggatcttcttatagatcttctttaacaattctaaaataacttcacagtatgctaggatagatcatgcagctctagctaagtaaatatcacacatcatcaacgaatatacttaaggttggtctatgcttccgattattctgccatcagaaaccgcctatacccgtgtttcgaccacatagggaacatcgccggtcaacaacaggcttaacttggattaaattgacccaatctgctgaccgagaggtcctttacattcataccatatcaaacccctgccctgtgaatcatggaccaaggacaaggaggccaaggcgagctcaactggcgcctcagcgcgcacccgatcacgctacttgtcttcttaagtattcggatcggtccgtattcccccaccccgagtaaaagcagcaagaatgatttggctaacttcatgattaggcgcgctactgatgtatctatttggtgtactcttcatcaacaacttgtacggaacctgcgaactacccgcctgtcaacctgcgatgctaacgttcatgtagtatcctcgtcttcattttcacccttctcctcctctccgcggatttctattacctcaaaaacatcgcgggacgccggctggtcggcctacgttggtggaacgaggtcgacacctcaaccggcgactcacagtgggtcttcgaatcagccgaccctaacgttcgcactataaccgccaccgacaagcggttcttctggctgagcttatatgtcacaccagctctgtgggtagcccttgccatattggctattgtgagacttgtcggtgtcatttggcttagtttgattggtaagttactcccaagatactttgatatatgccggcagtagatattgactttggtttagttattgcactcatcttgactatcacgaataccatggccttctctcgctgtgataaatttggtcaggcctcgacatatgccaactcggctctgggtggtggtattgtgaacaacatcgctggtggcctgctgggcaggctattccggtaatggtaggcaggttgatgcctgtcttgccgttagtggccctacattgtcatccctcttgtatgtgctctgtatttctagcaggatatttgaccacttagcattcaaatgcatcaatttctttcaaaatatggtctcatttgtagctctaatgtgattgaaaacccggtctaatgtaagtgctttatctctagagccgttgcctcaggtaggtcaacgcatcactctttcctcaaacacgcagtttccaccgcagcggcacctgccgattgccctttgttttccttttcctcctcttccctcttcatctccctcttcttcttcctcttcctcttctccattgacttcaatcatcgtcaacaaacagcctttgcgtctactgcgcttcaaaccccacgttggtaagtgtcgttcttagtgttgaccttgcaccatctctctcgatgaccctaggagagcgaatcagatgaaaatatcgtgcttcaattcttttatgtgtcttgtcccatctgcctttgccttctctcacccctccctagccctccatccatccattttttaacttacgcgctcctaaccattaccccagtgaaggatacttcacgacgacagactgttctggggaatttgactaacgagcctgtgtatcaagttgaccaaaatggagacaaatatccatgaagaccggaatgaagattttacctgcggacagtgagttctcccctccaaaattctagctttcaaggcttaggatatccccccgagaaaatcagtcacttaaaaattctagatgcggtggatctggccatatgactcgtcagtgcccgaatgcctctcttcctctgagacagagagacagcaatgcagggtaagttggtcctacactttccatgtcacattctgccagtccatctaaccaatgctaagatatagtgatgcctatggcaactacggcaacgacaatggtggaggacatggtgattactccggtggtggcggtgaccgcgcttgctacaactgcggccaagaagggtaagtcgttgatatctgtgtacttgccaaattttactgacaacaatgcagccatagcaaagccgactgtaccgagcctcgcaagatgggggcatgcttcaactgtggccaggacgggtgagttattattgaacatcttgtgtattacggcgttaattattctcttgaaacagtcactccaaggccgaatgcaccgagcctcgcaagatgggcgcttgcttcaactgtggcgaagaagggtgagtaactgctgggcgttttatactttagtttgctaattggctccaaatacagtcactccaagtccgaatgtcctaagcctcgcgtgttcaggggtacctgccgtatctgcgaaaaggaaggccacccagcggttgattgtcctgagagaccccccgatgtttgcaagaactgccaggcccaaggccacaagacgatggagtgcaaggagaatcgcaagttcgatctcaaccttgttgctgacatgctaccccaagaaggttgggctgcaatgaagaaagccagtgacgaaagggatcttgatgatttccgagaggtaccaaaaatccatacgtaccttgaaagtttcgaactttggctgacctaactccaggcacttaaaatctactccaaggcagtccccaatgccacctgggcagacattgagaagaagatgcgagaggataatttcaacatctacatcattgctatggtaatcaatcatcatcgttctgatacttggggatgaatcgctaatgaatgaattttaattataggaggctgaagttgacgatgtcatgagccttatcgatcttcagggagtacttgaccgtgagtacgtgattggattctttttcaaccccaaggcgtcgcgtggccacctccgagatcgttggcctgcagatgccgaggagaacctagagcgcatgaagagcgccggtattccctacgagcgcaaggtgcctaagtgcctgaactgtggaggtaagtgtttactttgaagattccttataatattgctaaattctgtttagagttgggacatatctcccgcagttgcaaggaggagcgcgccgagggcaatgatcgtgtggaaatcaagtgctcaaactgtgagggagctggacaccgcgtacgcgattgcagacagcagcgcaagcacaagcatggttgccgtaactgcgggtatgtggctgtggtgcaaacaacgaactggataatgctgacttttatgaagatctattgagcatattgcttctgactgcaccgagccccgatctgcggctggtgttgaatgccggagatgcaacgaaagtaagaccttgcccaagatgattcaaatatttcatgatgctaatgtatctatttcagctggccactttgccaaagattgccccactgttgctgaccgtggccctcgcacctgccgcaattgcgggtatgttaaaatatcatagcccctgcgattgtcgctgattctaacatcaatacagatccgaagaccacatcgctcgcgattgtgatcaacctcgtgacgtttccactgttacctgccgcaactgcgaaaagagtaagtgcgatgcatgccccaaagattcctggaaacacaactgacaactgctattttagccggacattactctcgtgattgtgatcagccgaaagattggtcgaaggttcagtgcaagaactgcggagaaagtgagttgatacatgcgtttttaatactgagttagtccgctaacaatccttagtgggtcacactgttgtccgttgccgccagccgcctaaggaggaagagcctcaagacgaacctactttctcccccggctctcccaagcgcgaggaacctgatccgctgaactcagaggctactgaccaacagtttgaatacaagcgccatgacgacgaggacctctggtaaaagacacaattctatgccagaatggggtgactggaaagctctaaaaacaatagcgatttggtttccctttatgccctgttatgatcggccccgtatgagagttgtcgggtgttgactgttcttgggatgcttcacggtggcctaagatggacaagaatctgatgttacatatggggtctatctttgctgctctctttttttcaaatctcgcgatgtgttttgatgtttgccaggatttcacccatgagtttacgatgattgctgaccggccgatggtcccaaaggaggatatctgttaagacttttcatgctctgttgagctcgatttgatttgacgcgcctccggatgaatctgaggatggagggtctgggcaggaggctctgatctggggacatttctgacgtgcattgttatctgacaagttcaatttcaagggaacatccatttagtgcattcttcttgactcattgtagactgcctagtaagatcgtttgaagttgaatgctacaggagtaagtgaatgacggcaccagctgtaaagtgaaccggaaaaaaacaaaaccttgcgcaataattccgactcgtatcatactcggagttcctcagttcggatcaaattcccgaggtcggctttacttggagtgccctatgccatgatttccgatgtcaaaccacattaaccttcgaagcaaattcccgtcgatcattgactgttacctcctagtcgatcgtcgttttactacagcacgttgttaggagttgtatttaccacgtcattaccgggttgatgtatcgtaggccgaatccgggattccggtgccctaactggctcactctatctacttggattagcaagttttggcttttcttggaatattgtgttgaatagttaataaagattactattgtcactctatttacttaacattttaaagtgatcgactgcataattgggtagtatcacgtaaatacagagttgcagttaggcatatccgaatcgggcatcccgtactctcggctaccccgtgattcggcctgtgccgagctatagatttttgtgtgacaaagaggaaggactctgaaatccacatgcgtaggatcaaaccacctacctattttggacattgtaaattcacctacctcgcctagtagttgggtgctaattgccgatgatgtcattaccggcttcggctatagccggtttgacgagcaggtttttcgggacctgaggccggtccgatgtgaggctaacacggaaagttcgtgaccccttgtcaccatccctgccaagtgtgcttggcgagtcaacggtgaagagaagataaaaatcgagtagtgagcgcaaggtaggaagcagtaattgcgcgcagtggtttgagcccaatttcgtgtccacagcaatatgtcttgtgcacatacgcccgtagtcctttcagcggcgatcagcggagaaaaaaaaatggggagtccgggggaactggagaatctccaggtttccgtcaaatgcaaccccaattgagtcccaacaatgtcaaaagtaccccgaaccacgcgagagcctgtgaaccgtgcagctgtcatacacttcatatcatcgacggaaacagaccgtccatgagtccatcggtgctgtcgagggctagaactgatgcaatcacaaatattaccgtattaagacagtactgtcaccgataccggacggagaccgacttgggccaccnnnnnnnnnnnnnnnnnnnnnnnnnnnnnnnnnnnnnnnnnnnnnnnnnnnnnnnnnnnnnnnnnnnnnnnnnnnnnnnnnnnnnnnnnnnnnnnnnnnnnnnnnnnnnnnnnnnnnnnnnnnnnnnnnnnnnnnnnnnnnnnnnnnnnnnnnnnnnnnnnnnnnnnnnnnnnnnnnnnnnnnnnnnnnnacttggccatgcgagggggctcgcatggccaactacgtgctcctcctgacgccgaattgccaggtggatcctttcgaaacctggaggcataccgatgatcacccactctctcgtctcggctgtcaagatgtggtatagtggctcgctcccccccgatcaggccatggtgtaggcatcgccaatgcaacgttgctactgcttctcattggcggcttgtctcttgctggttctgacttgatattagatgtggatactccccttgtttgactgcgaagttcataacctgactggtttccccggacctggctgtttcgttgttgaatctccttttctctgcctagctgcagtctgtccatttcaaatccattgaccccggcgaatagtcttccattctaggaattgactataagtctgtctttcttctgtaccctacaacctatacaccatatccgccatcatgaaaccatactttggccttcggggcacgaacctgaatatcatgatcggtgttattgccggtcttgatttcttgtatgttggtctttccattatctacttttgaagtatcactaacgcgaattacacaggctatttggatatgaccagtatgtcatcgcgaactgaacgtgcgaagtcttgtggtccttgtgctaacactcaacagaggtgttatgggaggtctattgacattgaactcatttgttaaggtcttccctgaaatcgacaccactaaatcgagttcatcgacgggcagcaacgcgactacacagggtatgcaattcatgacatctctcaattcattcatatactaattccgcaggaataaccatcgcttcttataacttgggctgtttctgcggtgcaatcctctgtatctggattggaaactaccttggccgtcgtaagaccatcttcgccggctctatcatcatggtgatcggggctacgctacagtcctgtgcttactcgctgccgcatctcgttgtcggccgtattgttactggtatcggtaacggcatgaatacctctaccgttcctacatggcagtctggtaaggagtcagctctgttgagaggagcccgatgctaatattacctagaatgctccaaggcccaccaccgcggaaaactcgtcatgctagagggttccttgattgctgctggaatcatgatcagttactggcttgactttggtttctccttccttgatcctagctccgttgcgtggcgcttcccaattgccttccagaacgtcttcgcattggtcatcttactcttcgttctaccactccccgaatcccctcgctggctcatcctgaagggccgcgaacaggaagctttgcaggttctctccgcgatcctcgatttggatgagaacgatgcctacgtacactcggagttctctgccattaaggatgccgtcctggctgcctcaagtgtcagcttccgtgacttgctcaccatggatgagaaccgccacttccaccgtgttgtactcgcctacgttaaccagatgttccagcagatctctggtattaacctgatcacctactacgctgctactatttatgagaactcacttggaatggatggcctgacatcgcgcattctcgccgcctgcaacggcactgaatatttcttggcgtctttggtccctatcttcattattgagaagatgggccgaagaatcatgatgttgatcggtgcggctggtatgtcgatttcaatggctgttttggctattaccactagctttgagggccagtccaagcctggtattgccgctgctgtattcctgttcgtcttcaatacattctttgcctttggctggctgggaatgacctggctatatcccgctgagattgtaaggctctcatctcttttattcctttacactaaaacaccactaacaacgcgataggtgcctctacgaatccgtgctcctgccaacgcactcgcaacctcgggcaactggatcttcaacttcatggtcgtcatggtcacgcctgtggcattcgacacaatcaagtacaagacatatattatctttgctgtcatgtgagtatattctgcgcggaatgcattagtgcacgactaactcggctcctattagcaatgcgttcatcttccccgtcgtctacttcttctaccctgaaactgcctatcgatccctggaggagatggacacaatcttccataagacatccaacgtcttcaatgtcgtctcggtcgcccggaacgaaccccaccgttacggaaagaacggcgagcttctcatcaactacgaggacaccgcggagcacctgcgtcgtgctagctatgtctcagagaagaagattaagctggctagtgggatggatgatatggagtctggaaagggtacccatgttgagcaccgccaggacagctcgtctgattaaattttagagaaggcattcttcttatgttaattatttacaatgataatcaacgattcacgattcggtgcatcaaatatttcatataaccctcatgtaggtcaaaaggtatcaacgacagaactcagccacaaatgccccattcaacctcacgctgaatcacaacgtgccatggccgctcacagcccaaaggccaatccaccaatcgcagcagctaggacagcagccaggatgccagtcccactgacacccacacttgctgcagaacctactttcatgattggaccagctgcaacccctccatctgttgaaccagacgaggtagtagccgtagcagtgacagccgaccacaacgtgacaggctctgtcgagctcttaagggaagtcgccgagaaaggagtcgtgaacgagtaacgagacgacttgctgctaagcgaagacgtcgcctcggcactgtttgtcgcataaacagaccagactgtgtaagtactcgtagttgtagaagtgaccgtctgaacagtgtatggggaataagaagtccagtaatagaaccaataagtcctatactacaatcagcaaagcatccacaaaccaaaaaccaacataatcagaccacataccagtagacagtcgtataataataatcccaatcaaccgcaacataacccgcagtagcagtagtagtagcagtagcagtctcaacctccgtcgccgtaagcgtagccccagccgcaaccccatcatactccccagcacaacccgtcagcgcacagcaaaccttctctcccctgtagatccgacacgtcctcccgacccgacagtagtaacccccggaacagcactgcgcaccgagcggcgcacaccccgtcgtcccgcagcacttatacccgagcggacacgtcccgccaccagcgcagcacgtgtcgcctatcgaggcacagtacccgttcccgcagcacttcccgccgatccgacagcagcggcttgtgtcgtatgcgcattcgctgtacccgattttgcattccagggcgcgtgtattcagggttgagttctcgccggagaggactaggggaagggagaagatatcatctgcatcgaaggagatggagatgttggagaggagttggggctcgtcttgatcggtgggtgtgctggctgctatgttggcaaggaggagggatagggctaggcatgtaaaggaagggaagaagattggggagagcatcttggagaaagaaagcttggtggcttggttatggtgtactgctctgttggaaatgtcggggtggaactgcgattttaagtcgcttcccctgggcactgcctacatcaatgcggctggataaaagataaatatgcccaagcgagcatgtttaagattgttgttcgtattcacgggaatttttgggccatattacctataagggttgggttgttatgtttgcaaatacgaggtgtgtcgcttggcgcgggctcgagccgctttttcttggttgatttacggggtgctcgctgtatgggaccgagaagaggggagccgaaactgcgctagatagtttggcttgctcctaggcttttttctcgttgataacgttgatgtaaaggtctggaggtgttcttggctttagggcttagcgatcctcgtgatagtgctccatttggttaggtcagattctcatgcagtgtttctttgtcaagatgagaatcagactagcaattgatttggtttgtattcgattccgagaaacacacggtcttgttgtagagttcgagctctatccttggacagggtcgacgttgtgaagaggaggacatctccgtggaaagaagtatcaagactcctaatcctagtgcaccatatcatttgtcacatatggaacctcaagaagagttggtatctctaggaatagcatagtctaaaacatgcgttagcaggagacaacgaacatgaggaacagctgaagtgaaggaaacaaaacaaacaggtcttgattcagtccaggcctaaatcaggcattaaggcattattatttactcaaaatggggttttggcccctggcgtcggactacatatgcacactatgattgtgacacaagacctggctctatttcttgcgcatgtcagctcactacacaactatctctcttttcagattcaaggctatttgcaataagccaaagcttcatcttttgcctgtacccgagccctaccatgacccgatttgagtattttcgatagaccacgtgatggtcccgagaccggcgatcaagatgttgatcataatgagaatacataaaagactttgaattgcgaaagtagttctgagtcatttcgtgggatgctgttttgactggacatgattcaatggtatgtccatagcattctgaaagctagcagctaacagcttacagctccgcaagtcaaagcagaaaaattcaaatgttatagtccaagatatagaacggaccaagacccataggaggtgaggatagcctcgggagaaaaagatttaaggttatcctcggtgaagagctcgttgggaaaaaaaaccgaaggatcttccctcaacctcaacctcaacctcaatcttgaaaatctcaacctcaccggagatttgaattccatctcggatgttcaagtctatgagtcacgcgattcgtgcataagactataagacttccttaatatcggggacttttaaggatcttattgaggggtctttttctccgccaagatccacccctctctttatcagatccgaaaacggagtattttttcgagatccaagtcaacgtatgtttatacctctctgacctcagggaagatagcctgtgtccaggaggaattgaactatacaaaatgaacagccattgactcacaattcacagaaatccatctagttgatatcccgggccattggcgtccttcaattggcattgcttttagcggctatttgcccgcaaagaggctgaataaagattctatacacatataatattaataagacgacaagatgtccaccaaagatcaacatgcctctgtcagcattgacaagcaacctatctctgaggatatttccgagcagccagagcctcaaagccaggtatcctcagacgacgtcgactccttggaccatagcgtggccaacatcgaacgaatctacaggtaaatcgcctacccgaaagacaatccaacttcagaacctaacatccacagaaaactggaccgtcgcatcatctccgcattttgggtcctctacttcctttgttcagccatccggtcgaacgtaggcctagcacagacaatgaacacagactctggccacgacctcgcaagtgtgctccacctaacccgacacgagatctcaaccggtctcgccctcttctacgtctgctacgtggtcttcgacctcccgtcgaacctaatcatgacccgtctaagcccccacgtctggatgagccgcatcgtggtcagcgtaggcctaattggaagctgtctcgccgctatgaaggcagcctggagcttttagtatgttcaattctcccgcaccatcccaattcatcccacatcatgtatctaacaaacctagcctcctccgcctcctcctcggcatcgtcacagcaggcatgtggccaggcatgacatactacctaaccctcttctacccaccctcccgcatcggaaaacgcatcggacaatacttcacagcctcgcaagtctccgccgccgtcgtcggactcgtctcagccgggttccaaaaaatggacggcgcccacggcctcgtcggcttccagtggatgttcctcgtctacggcgtcatcaccgtcgccctgggcttcggcctgctctggtggttaccggacagacccacggcgccgggcgagtcagcgccgaaacgcacctggatcatgcgctgggtgcctgctaccgcgccggcgctgaaaggcgctgacgccgtcgtgcactaccatgacctgaagcgcgtgtatcactcgtcggcatggacgctgcgggatctgctcgcggtgtttttggattggagactgtatccgctgctgattatgtactttggtgttgtgggtgttgggattggcgtgcagttgtatgcgaacttgattatcaaggctattgatccgactttgagtgatgtttcgttgagtttgttgacggctccgatttggattgtaggtttcccccctcttcttatcctttcctcctttctttccgtccaagatccatccgctaacacatctatagatggacctcatagccatcctcctcgtaacccccctctcagaccgcttccaccgccaccgtgcaatcttcttctccatccccgtcctgctccaaattctcggcctcctcctaacaacctacgcgggcacagacgccaacccgtggccacggtacggcggcctcctaatcgtcggattcggactaggcccaacagtcccgataaccatgacgtggacgacggagatcttccagccgcgacacggcgaggtcggcgtagccgctgcgtcggctgttgtctccggactcgggaatctgggcagtatcctcacgacgtatgcgctgtattcgggctggaagagtgactacgaggcgcctgggcgtgagaagtataggaagagtaacctggtcatgattgggattctcggggcgagtattgtctctgccgggttcatggaggttatgttgcgctttgtggatgggaggtatcggggtggtgatgatgagggggcggttgatggggctgccaggcgggaggtgcggcagcgggggttgcatgggttgggggctggggtcacgcgttggttgaggatggggaggtgatcggtagacttgtgtgtggccgtggtgcaacggtgaaaatgttggcatatttctctagattttctgcttgcgtggacttttatagaactatagaagggaatgaatacgatctactttatagatggagaatacctgcttcgttcatccagatccatgcttctacaaagttggtcgtgctcggctatttgatcctgtcatatactccatgctctataaaggggaagaagcttccgttggatgctggagtgatactagattgagttcaagatccttccatgtgagatcgaaatactccgaggtctgattaagattagaccaatgaaaaaggaatacgaaaagtacaagagcagcaattcggcgtaagcgcaaaacaaagttgaggtcagtaacaattgaacttggtattaattgtcgattctccagaggaacgatatcagtatgatatctctcgataaacgatggtgtggtttccccatccatgaatattctatgctattgtacgtgtcacattaccctgtgaagggaagtcgagagaaacagaaaaaaataagtgcggctggtgcaacgagggagggccagcaggaacgcataggcggacactggaaccgggagaaagaaagggatagaacgagaagaaagacaggaagaggaagagagaaaaggcagatcacagaacatctatgggggctccctcacgcagtcaagccgctctggtccgactcccaggttgacgccgagggtatcggagcgctaagaccaaatgattccaatccatttagatgccaccacacatagtctcaacgatgataccggtaatctggtagggatcagcgttggaagcggggcgacgatcctcgaagtaacccttgccgtccttggcgcactggcgggggatacggatggagccaccacggtcggcaacaccgtaagagaacttgtcgatgctgccggtctcgtggcgaccggtgagacgctcctcgttaccctcaccgtagacggcgatgtgctcaacgtggcgggcctcgaacttcttcatgacggcctcaataaccttcataccaccatcggcacgagtggcgttggtggagacgttggagtgaagaccggcaccgttccactcacccttgatgggcttggggtcgaaggagatgcggacaccaaactcttcagcgacacggtggagaaggaaacgggacatccagaggtgatcacccactaaattaacagttagtctcagatattcattgcagtccgggattgcgaaacttactatcgatgccagggcaggggccaacctggtactcccactgggaaggcatgacctcggcgttgataccagagatgttgataccggcgtacaggcaggcacggtagtgagcctcgacgatatcacggcagtagaccttgccggtaccgacaccgcagtagtaaggaccctgggcaccggggaaaccgccacggggccagccgtagggccacccatcggtaccgaggagagtgtactcctgctccagaccgaaccagaagccctcgctggcgtgagcctccatcagacggttggcatcatgacggtagttgaacttgttggggcttccatcggcatcccaggtctcgcagaggacaaggatgttgtcaccctggcggaaggggtcggggtagtaagcgacggggcgaaggtagacatcggagttgtcaccgggggcctggttggtggaggaaccgtcaaagttccactcaggaagctcatcaacactcgtgacgggcttgaagagagtctgttggattcccgttagtgagttgttcgagggagcgcgatctcacgtgacggcgggtggctgcgtcgcatagatcaagaatccccgtgcaccatatccgtgcacagggcttatcacagccgggaggggattccagataagaacacgcagcaaccacgcgccgacagtccaccatgtgtagccagagaaaacgtgggaattgagatgagtcataccttcgtcttggagcgagtgccaccgttggagtcaatccaaacgtattcagcttgaacgcgtccacgctggtcaaggttcatgtatttcatgagctgtttcagtcagtatatgtcattcctcactggctcgaaggccattgtggaaatccaaaatcaagaatcaaacgcacattccccgtgttggagacgacagttgcagattcggacgcctgagaagaagcggtcagcattggttctacacgcacaagagagagggatgactcgtaccatagtgaatatgggtatgtgtgatgttttaacaggttttcaagcaatcaagcaatgacttttgtagagaagagtcccgaaggaaggaaaacacgaagggacctcaagaatagaaagcgaattggatatggatgggagaatccagaggagagaatgagttttaaagatgtggaggggcaagggagggatgataacctttgggaaaaaaaaaggaatttaaatttagtcactgactttctcttttgggaatttctttttttatttcttttgtttttttcttggcaaaatcaggaaggcgcggctcagccactacctaaaggggtcaagcgtggtatcatcgctgtaatggtctgtaaagcggtcgaccgatacggggtacagataaagtacctcatacatatttgtgcgcgtcggcaaagcctttcctgaaacgttggggaattaaaaaaaaaaaaaagccctcactctattttagtgcttctccgttctccgttctccgtcccgtcagtattctccagttatttcaatataccatttttaatgcctcaatatcaaaatagatcgtctacaatgtcacaaggacctcttagtttttcttagtttttcttcagccgagcggaacgccgtagcctgtgaagttgcaacttttcaccgagattcaacgccactcattaacttccgtgtcatcatcgtcgcatcatccagacaccccccc

SEQ ID NO: 62 - DNA, 296419 bp, Penicillium roqueforti
  misc_feature (113)..(1575): n is a, c, g, or t
  misc_feature (13292)..(13456): n is a, c, g, or t
  misc_feature (30858)..(31005): n is a, c, g, or t
  misc_feature (105358)..(105501): n is a, c, g, or t
  misc_feature (186905)..(186912): n is a, c, g, or t
  misc_feature (220820)..(221065): n is a, c, g, or t
  misc_feature (242007)..(242251): n is a, c, g, or t
  misc_feature (276485)..(276703): n is a, c, g, or t
  misc_feature (282126)..(283826): n is a, c, g, or t
  misc_feature (288818)..(295104): n is a, c, g, or t
aagacaattaactcagaagatcaactcagagtattaactcggaagattaactcagagtattaactcagaggtttaactcagacaattaactcagaggtttaacttagaggatnnnnnnnnnnnnnnnnnnnnnnnnnnnnnnnnnnnnnnnnnnnnnnnnnnnnnnnnnnnnnnnnnnnnnnnnnnnnnnnnnnnnnnnnnnnnnnnnnnnnnnnnnnnnnnnnnnnnnnnnnnnnnnnnnnnnnnnnnnnnnnnnnnnnnnnnnnnnnnnnnnnnnnnnnnnnnnnnnnnnnnnnnnnnnnnnnnnnnnnnnnnnnnnnnnnnnnnnnnnnnnnnnnnnnnnnnnnnnnnnnnnnnnnnnnnnnnnnnnnnnnnnnnnnnnnnnnnnnnnnnnnnnnnnnnnnnnnnnnnnnnnnnnnnnnnnnnnnnnnnnnnnnnnnnnnnnnnnnnnnnnnnnnnnnnnnnnnnnnnnnnnnnnnnnnnnnnnnnnnnnnnnnnnnnnnnnnnnnnnnnnnnnnnnnnnnnnnnnnnnnnnnnnnnnnnnnnnnnnnnnnnnnnnnnnnnnnnnnnnnnnnnnnnnnnnnnnnnnnnnnnnnnnnnnnnnnnnnnnnnnnnnnnnnnnnnnnnnnnnnnnnnnnnnnnnnnnnnnnnnnnnnnnnnnnnnnnnnnnnnnnnnnnnnnnnnnnnnnnnnnnnnnnnnnnnnnnnnnnnnnnnnnnnnnnnnnnnnnnnnnnnnnnnnnnnnnnnnnnnnnnnnnnnnnnnnnnnnnnnnnnnnnnnnnnnnnnnnnnnnnnnnnnnnnnnnnnnnnnnnnnnnnnnnnnnnnnnnnnnnnnnnnnnnnnnnnnnnnnnnnnnnnnnnnnnnnnnnnnnnnnnnnnnnnnnnnnnnnnnnnnnnnnnnnnnnnnnnnnnnnnnnnnnnnnnnnnnnnnnnnnnnnnnnnnnnnnnnnnnnnnnnnnnnnnnnnnnnnnnnnnnnnnnnnnnnnnnnnnnnnnnnnnnnnnnnnnnnnnnnnnnnnnnnnnnnnnnnnnnnnnnnnnnnnnnnnnnnnnnnnnnnnnnnnnnnnnnnnnnnnnnnnnnnnnnnnnnnnnnnnnnnnnnnnnnnnnnnnnnnnnnnnnnnnnnnnnnnnnnnnnnnnnnnnnnnnnnnnnnnnnnnnnnnnnnnnnnnnnnnnnnnnnnnnnnnnnnnnnnnnnnnnnnnnnnnnnnnnnnnnnnnnnnnnnnnnnnnnnnnnnnnnnnnnnnnnnnnnnnnnnnnnnnnnnnnnnnnnnnnnnnnnnnnnnnnnnnnnnnnnnnnnnnnnnnnnnnnnnnnnnnnnnnnnnnnnnnnnnnnnnnnnnnnnnnnnnnnnnnnnnnnnnnnnnnnnnnnnnnnnnnnnnnnnnnnnnnnnnnnnnnnnnnnnnnnnnnnnnnnnnnnnnnnnnnnnnnnnnnnnnnnnnnnnnnnnnnnnnnnnnnnnnnnnnnnnnnnnnnnnnnnnnnnnnnnnnnnnnnnnnnnnnnnnnnnnnnnnnnnnnnnnnnnnnnnnnnnnnnnnnnnnnnnnnnnnnnnnnnnnnnnnnnnnnnnnnnnnnnnnnntagtaaattggatgcacaaatttaaggtccctactataagtactcaaaatttcaaagggttaaaatacagttaagaggtagttatggtgcgtacaaaatatggccgaattaggttagtgtcattcttcccgtagccctaaacctcaaagatataccttaactttaaccacgaatttcagacgctacactagctggatacgaaagataagatatgatctagaatgcttaagaaaagggctttctagtgatactaaaataatagtaaatactcattattttatatgtacttaggctctatgatttcctatatagaaacgtctagctagcgcggcacccaggctactagcccattcaacccaaacgcgattgaagaaactgtttaatagtgctaggtataccaaatcctgtttctagcacgggtagatatcaatttatgtccgcgatccccggataccggacataataggcctgccagtcatcaatctcagtcatcttgtggaatcccggaagctgcacaatacgccagcgtatgttcatccagcccacgtcatcctcagtacacccttcaaggggctcgaactcctcaggctctgatatatcctcgtcctcagagtcctcttcaggcacatctgtccatttccattcagcattaaccatgcggacatgccctaattcatattcttcgaaccctcccaagggggtgtttagaacggactccatagcctcctggtccacggtgatgaagaagcggtatcggccgctcgttggagtatagtcttcgcttacgccctgttcctcttttaatgcagtcttcttccactgatagaagtgctcgcgtagggtggcaaccgtggcaccctcaaaggaggggtcttccaagaccgttggggcgaatgtgtcgaggagatcaaggccactgtattccttaaggtcttctgagacggcgccgaccatgcgagccatgaagttctcccagtcagagtcattgtggtacgtgcaacgaaagatcacgaagccccaggttgtgaatccatcctccttgagaagtccctcgaccagatcagccccattcataaaggaatacattgtgggatcgcgctttgagcgagaggccattgtggtggatgttgagagactcctgattgtgttgaaatgtgatgtagataaggactttgcgagacgtgagggaggttcgaagggaaagcgaaagaaggtcgggcgggtaacgcttgggcgggcgaattggctgtagatcggtagatggcgtgtagtttgaagtatcctcctagtagtcatgagtgcgaaggcaggccttggttctgttgagatgaggataagtaggggaaagaggtgggggctagggggtatggtccaggggcaagcaggatctctcaagtttgcagagatttaaagtggagatgcgagtataccctcaaacgctttaaattgcttaaatctcaggttcccaggatgatgaaacactacgcccgtctgggcaaggggagaagtgatcggagcctcggagggccggccggggaagggattcgcgggtccgtgttatcgggcggctcggaataagttcgatacgcgcgctatggtcataaatcaagagcaatttcttctaccgtggatactctgaccatttagtcgcaattttacccacaagactgggcagttgcaccttggcatgatgtcttatcgacttacaccacactaacttcatacatacgcatctatgaagaaacccccacacacaccgagtacccgactcctagatactcacagtccgatccaatcgcaggattccacttgtatagttcagcaaaagtaataccatacgcggtctcgatcttggcgcacgaatcgttcgacaccaccgtgtaatactggttgcagttcgacgcgattcccgtctgagtgggtgcacttgctgttgcgctggtcgtcgatgccggtcccttgacacagtatgcttctcctagccacaaattggtacaagtagagccaacactggggttccactgatagaattgagcaagggtgatgctgaacttggtctcgactgtggcacagtcgtcgccctttgtagtggtgtagaacttctcgcatcccgacacagtgtcggttggagtgggccccatggaagaggaggaggaggtggtggtgggggtttgggtggcagttccactggctgtagtcgttgcagctgcagacccgacaccaatacagatggcgcggtcatccgtggcatttaggctggcatagagcgcagtgtcacagtctccttccagccagctgttccaggacacaaggtcgtccatggtcaggctgtaatcgtaaatgatgtcgtcgcaggtgtatactagcatttgattagtaatagcacgattggggagggtcaaatcataccgtcagagtaagacaggtcgacggaggtgaagcaattgcagttgaatgccgttccagcctccgtagcattcatgggaaggcagagcccactatcagtatcctccgttgctacatctgcgtcagcctaatctatttgttcgagccagcggtacttacaggcagtgctgttttcataccgcaggatgcagtagctgttttccttgttgagctcacaggtgcttgcgttgttcacaagacttggattccaagtgaccatttgtttcattgtaatgccccaaaatgtcgccatcgccacacactcagaagtatagttggaaggattttcgtagtcatagcagtctgggatagtgcccgaagcggtgggaaggagcgccgctcccgtatacacatagccaggatcgcttgtggccgtaggtatgtcagtattcacgttggtgaagttgacgggcgtgacggtgatgggcaatactccagtcaccgtgtagtttgcgtagctggtgattgaaccaacggccttaacacagtatgcctcgtcaagcaggaggtttgtgcagtttgcgtcgatttctgggttcaggaagtagaagtcggtaagggagatagaatgggcgagagagaccttggcacattcatcgcctttttgaacctagtagaaatgagcaaagacccaacttggatggaaggatcactcaccgtataccactggctgcagttgcggttgctattgtccatagcatttgttgggaccgctgcaatgccagtggctactccagtttcggttgcgcttgagtcggatccaccagcagtctgattcaagtagccactcgggggactgtaaaggtcaatattccgtgactctcaaattgagattgaagcgaaatctactcacctcacacacacctcatatccaatgaagaaaatcgcattcagacagagggaattgatattggggttccaggagaagaactgcggaagagtcacattcgcgaggccgccgacgacactatcgcaagtgtcatcagcctgccaggtgtgtgtggtgcactgcgaggggacacagagtgtctggttgactttcgccgcaaagttttgacagtagagatccaagtcgttggtttgcagtaggtagtatgtagagactcccagcgactttgccacggagttacagtcgtctgtttccttcacctgataatagttttcgcagctggttgttgccgagctggttgcaggcgagctggttgcagtcgcagttgcattaagcgcgtacgcagttggggaagtgactgagtaacccgtggcgctgcagctcgacgtcaaagaagtgaagctgtccgccacgccctcatcataccctaaggggctgtttaattgagtctctaatgtccccagccaacaatccgagcaagaaccattaacaggccaagacccgttggaccaggagagcaattgcgggtcacagtaacccccggacctaatgatggtcagaatcgataatcattggcagaatcaccactcactcatctttccgacaagatatgtcataggtcaacatgtacttgtcagcgataaatgtagctggataagctacatcctcaacgacgatcacatcggtggtctctgagcaggccgccttgatggttgctctggcgcttttcaaagaactatagcaggtgtcgacgcaaagttcatcgacttgatcaccatccagaagagagttgctgtttaaatcagctttgagcccgcaatttatgaatcagacctactctggggacacaacgggcagaaatgccggacaggacacattagtcgacaaggcttctttgcaaccatcggtgagaccaggatagcttgtgaatcctcgaatgccagcaggctgctgggcaagggccgtggaaattagtagagcccacggggcagtccacatcccacgcatctttgagcaatgtagtaatcaccactcaagataatgaattggtgagactgcaaccactagatagcctggtatacaagtattccagagctcaattcacaaggaagagagaagaaaagtggaaaaatgatgttgggacttcgctgagtagttccatatgcagagcaattttatcattctgcatctagacaaagtatatggctcgttcagcactggcccccaagggtacaatcgtttccacatccacttcacttccaatcgggcatatcccggacgggtctcacgaggattttgagattactgcggagctcaagggctgccgcttggttagactagaatcaagcatgcaggcgaagacttagcgatcacttgaaacatgagaaattttctttggatcgagtttagcgagggattccaagctacggagtacgcgaagagtacctcagtggcttgatgcggatccttcggccgcgtaccgtgggctcgactagtagtccctagtagtccctggcttagcgtcggttcacctactcatcctgtctgaaccgggggccaaatggtgggtcgtaaaattaaatcaaaccgcgcgtgcagtagatcgatttcacgctccgtagttgagagtatggtcagtggccttgacgaagatttgaatttttgaatttttggatgggatcttttgataccgccaatccgagtagtatttggctttctataatcaggctgatttgtagaagcctagaatagcagaatatttatcgcaacaccaatataagatacttttcacaaactccggatcgctcggttgatccaccagcttcagttaattaatacctcattatcagtgccggtggtttcatccatttttcggatacctagacgtggtggggctttatgtaggatacctagtgtagagctgaaaccacccggtgtagacccacatggcgtatctgcaagcatgctggaacaatgcacttagcgtatactgcccaaaggccttctttgcagggctatctacatttcctgtaaaaggagggatttctccaagtccagtgtatcaatgctcagtctattttgaccctgttcgttctttccatcatcctttccttcatttctcttgcatgagattgccttgagcaagccaatctgctgcaatggctactggtcaagctttcaaaaaggagcacttctttcgtgttctctttggcattgtgcttggcttattgtgtctggtcttctggccgcacagcttgaaactgtctggctctagtattgctcgccgcgcttccactgttgacagcttagaagtcaataaccacgtttccatctctgcccgagatgattactcctgcagtgctagcaatccctgcagcaatggagcttgctgcggtgccagtggctactgtggctacggtgatacatactgtggcaaggggtgtgtctcaaactgcgatgctattgcagagtgcggaaagtacacgcagcctgcgaacaagacatgcccactcaacacttgctgtagcgaatttggatttgtgggttgctatttcataagttagacgaacacggttaacctctattagtgcgggacaacgaaagacttctgcaatggtatgtccttcagttcctgatctcaaccagagactgacgactagaagatgcttgccagagcaactgtcatctgaatgtcactgtcccggcaggtggatcctcaagcggtgtactgcaaaacaaggtcatcggctattacgaggcatggatggctcgtaagagctgccacaaaatcaagccggtcaacttgccattggatgcactgactcagtgagccctattgctttcctaaccagtcatgcccatgctgacattgagcagtgtaaactttgcatttgcatcgattgatccttccacatatcaggtcgttgcgatggactcggcaactccgacaagtctcttctcagatgtgaccaacctcaagtctgtgaaggaagatatcaaggtctatgtcagcattggagggtggactttctctgataacggcaccgacacacagcccgtgttcggagatatcgctgcatccacgagcaatcgcaaaaagttcgccaataatgtggtacacttcatgcgtcaatacggtatcttcacttatttgtttgtttgtcttatctaatctttaacagggtttgacggtgtcgatcttgattgggaatatcctggtgctggtgaccgaggtggcaaggccagagacacagaaaactacgtcctcttgctcaagaccctcaaagaggttttcgatgatagcggaaacaagtatgggctgaccttcacagccccttcgtcatactggtatcttcgatggtttgatctcccaaaaatggtcaagtacgcggattggattaatatcatgacatacgatcttcatggagtgtgggatgcctccaatccgattggaagtattttgcagggacatactaatctgactgagatcaagagtgccctcgatcttttttggagggttgaggtccctccctcgaaagtggtcctgggtcttggattttacggtcgtgcgttcacccttcaagataaggaatgttcaaagcccggttgtgcattcaagggtgcctcgggccctgggtcctgctcggatacagctggtatgctcgcgtactatgagattgccagcattctgcagggaacctcgaagaaacgagccaccatctccccagtccacgataaggaggctgcagtcaactatttcacctttgatgacaatcagtgggtttcatacgatgacaagactacattcaagcaaaaggtctcctgggcggatgaagtcgggctgggaggggcaatgatctgggcatctgacttgggtatgattttgcttgctctgagcgaatttacactaactattcattagacaccgataaatacgatgcccatacagacctcattgatcgagaaatcatatcgacatcaacactcaagcttgagaacaaggcaaaggcaaatcccgggacaaccgtcgaagatttgtctgcgttcacagggcagaaatgcttcaagcacacagggaaatgtctcaaaattgacgatacaaaagccatgtccaaagcatgtggcagcggctatactgttgtcggctgggacgacgcagggtgcggaaagtccaactgcgtaagtgaaccatctatgctcggtcaattcatgtctcacgattctgtcttcatcagcattgcggaaagccgatttgttgcccaactggtgccgccccgaagaactgcatgtggcgtggacaggatactggccaaaagggagctagttctgactgcagcgggcaatgtgccgcgggagaaatcaacgttgccggcattcgctcttcttggggtggcgggtatctcaacgataaaaacacgggcaagtgcggtcgtggctataaggcattctgctgtccagaccctgactacaagcaagttaccaagacttgctcttgggccaagtggtgcgtaccaactcaagtcaattgactatgcaccaactgacttttttacacctccagtggggagaactgcccacccagaaaatctgctgttctaacaaagtatgacgaatgttattccaaaggacgaaagtattgttgttccgatccagcggagctggtcagttgccaatgggagaatggaagcggcggtgacggcgattgcgcgaatgccgtgtgcaattcaactcaagttgagatcgccaagtctaccttaggtgatggcagtacctcttgtgaatgtaagtttgtctactttcaatctctcgttttgctttctgtatagtggcctaacaaggatctgattagggggccgacaacggtcaggatgctgtacagtgacgaaggcgccaacccgcaaggcaacctgcacttacaacatctgcgacttggattccgactattgctattccgatccgcttctttataagagagacgatcaagacaccccagactccgattacagtggtgacgactccagcatcgccaaacgtgctggtagagaacgcaagacattcaaaattgtacttgggacattcagctactggatcgcgggctatccaagcattggcaagctcttaaatccggaaaaatacggagctgctttactcacaaaggctttccgaacgcggagcggcttttgcgcaggctctacgctggatatcgtcaacttgccgaaaaatcctactgaaaagcaacgaaaagatcttgacacagagcatccgcttgacaaggggttgcagggacttttctacaagtacatggggaatcgagagctcccaggcgatagatccgccaatttcccaaagattgatcccaagttctgggacaaattcaatgagcccaatgcaaaactaggtgccatggctcaattcggcaaggaccgcaagggaaaaaagccgatgtccccggcagagtatttggccgaagcttatgggtccgaaaggaacccacggcccttcatgccggttgaaaatggcctgaatattgccaaaagagatattttcttgggcaaatctccggtccaagctacaaagctcaggaaagctgcaacgtccgctgtcaaagcggacacagatacagcggcagacaagatgctttcgttgcttcaaactgtaagtggctatggctttgttctggatttcacgcaagctaacccaggtttctaggccttttcctcctttgaatatattcgaaatgagatgtttctggagagattcgacggagtgatcgatgatacattcacagcttggagtaatatcgagcaggcgactgagacgtataacctgcagaattggcacgggttggtcttggatgctcagttcacgtatgccctggatcaggcacgtcgctgggcacgggaatcaattcgaattgccagggctccgtatgtcgaagcatatgaggccggtcgcagcttggccacttatgatcgtgtgatgactgccttggatcagtttgaggatcttatctcgcagattaagatgccggatgttacttccgaggactacaagaagcggaatccctataatggtgaggggccaagtggatctaactcatgatttagaaccttgaaaatttacgattccaattcaatgatcagccttaccgagtcttccagcgatgcatcttcactctggtctttcggagagctatgttggtctgggatcgatcgatatatactgcgtatgacggaaagtgggtttccctgccgagcttcgtctttcccaaagaggaaaaggtgcctcaagatgattattttcaaaatctcccagcgagatggtgaggctcgggagcttgaatgtcgtaactgatggcaaatataatcagctttgtagtcttaaagcagttgaagtgtctgaggctggtagggtaccgaaggcgcagcagcaatgtatggtagaatcgatgattgtaggagacaagagagaaaaagagagagaagctgtcgaaatctaaactacgcgggagccaaacggggagccaaacatagctataaccgaggaatctagggagagaggcaaaagcgggctgaattggctaaatctactactcattgcctagctggggaaaagaaggaagagagagagagagagctatatagtccggataatcacctaaccttccaatccaagaataaccaactagcctccgaatactgcgagagatgaaagggaaataaaagtaaaaaagtagctataaaacgaagtttacgtcggcgggggaaggagcatctccctacaattgcaatcgtcacgtcgccacctgttggctaagtgtcaaggtaatgtacgagttcttagagtaaaagactaggaataattgatttttcaatgaagtacaagtagtgatttaaggtgtgatgtttgtgggtctattgagccccggtaagtggggcctttgatggtctttaatgctattcctattagtgtactaccatagaagaaagcggtctatggtagaatcttagacttaagaagataatatatagttaaccctattaaaatatcttaaatccgcctatataataaagggctaatacctagtactaaagctaggcttagaacctatacttttataagtagacttcttagggagttcaatataaactattaaaaccttagcgcgatttagcctacctgagacatttatttccgagcctccgtaaaaaaaagaatatttggaaatgttcctccagaattaccccaaatgaaactcaaatcctcttatgtccgagtgctaccgctgatccagggatttgggcttatttcgggttcggctgtagcggccgagatttccgagtgcgtaaaaccaagtgtatcttcggagtcacctccgacccgaactcggagctcggcttagtggacaggccttttccatatgaatttgccgaggggtccaagtatacctgcctgccataagcccgaaacatagaaaaagacctgcaattgaaaagaatgatggattaaagcattgtagcgtttctacgtctgcagtatcggtggagatactattcaacaagggccgagatttattaggcgtgagtagaaatagtttgaacgctgagaccatgcggcggttaatgttgttacgaggtatacagtccactgccactagtagcagacctctattatccaaataaaatagtgtgccatcctgagtggtgtgtgtgtctatctcgaatgatgacattatttaccagatgatcgacaaatagtatttcctacttggatagagaaccctcatttggacgggagataaaacaagatgtcggaattgtggatctatgtaattagataatccttaccctacaaacagaggagctactccggcaccgagtcaccgactacgaaggtgtatagtggccaacagtcggatgcctgattttaatggttttatcgcctaattgggactagctcttaccagttttagaccgcctttgacaccgctcaataccatcttttgtaagtacacatcgaagagacgaaactgttaccatggggtaattcaaatgccttctacctattttaattctcaaaactacattcaaatattcgccacgccggagccagaggatacggagagtttgaagtttatacggtcggtaggaatggggactttgtgttgaaatccaggcttggctttccaaccgttttgggccttggtgtcagttgcgctattagcttttctccgggaaagtgcgggactacggcgggtatgaatggctttaaatacaggagattcatatagttggagggccttaacgcctaggatcgatgagaaatagtattttggggggggggggggggggtatgcaaactttctttttccaatttttaaccnnnnnnnnnnnnnnnnnnnnnnnnnnnnnnnnnnnnnnnnnnnnnnnnnnnnnnnnnnnnnnnnnnnnnnnnnnnnnnnnnnnnnnnnnnnnnnnnnnnnnnnnnnnnnnnnnnnnnnnnnnnnnnnnnnnnnnnnnnnnnnnnnnnnnnnnnnnnnnnnnnnnnagatgggggggggggggggggggggggggggggggggtatgaatagcttcatgtttcaactttcaagctgttctcaatttggtactaggagatctgtcatagtaattcaggtattttaatttcctgccggtctaaaattggtaagagctagtcctaattaggctataaaaccattaaaatcaggcatccggctgttggccgctatacaccttcgtacaccgactctcttggcgccctatctagcatggacacgagcctctgtgaggcctgacggacaagccgacagttgcgagacaaattgttgaagatattcggggaatcaggaaagttcacgctctaacacggctctactaacactgcccagtaagcgtcacgtaacgagttatttcactttataactctccaatcttccaatttctttcacctcgcttactgatgggtcaatccgttattgctatgtttaagcaccaaggcctgtaatgcgaaattggatttctctatgcattcggactggcctcgctatggcaaatcttatcaatagataaataggtaggttgcattcttaactactaagatgctccttgaaccactcaagtgcttgcagaaacgcgctctgcatcgcgtatctcaccacggggctctcgtgatcgcctcgcaccgcaaagccatgcttgacaccaccatataggttcatttgccagggaaggttcaattcttttaagatagcctccgtctcctggcgcttctctgcgggaaatatggcatcaagctcggcggcagcaatggccagcgggccctttatgctttttaattcattcgcttcgacgtgcgatgggtgcgcagtgtacccaacgtcaatctttcccggaagtaggtgtcgaacgacatatttgccgccgaaacagtaccccacagctccgagtttctagtttatcctcagtaaatattgtcttcgacaactccaaaaatacgtaccttacaattaaagtttgtatgcatctctctgatgcaagtctcaacaataggatcgatatctatgggaagatgagcttttccttggggatggtattctcccattctccacttctgcatgtcgaattcgcctggtttgttcagcggtacagggtcaccgtgaaagaggtccggcatcataacaaaatagccattcgtcgcaaactggtcagcgatgagttgagcgtttgtgaaccggtggccaatgatgtccgtgagtctatccatcagatggtaagtaagcccagagtaatcggtatgaggccaaaatcgaggattatccgcacttacatcaggatcccattctccgttgacttgttaggagggtggctggtatagacctcgaatccatttagggttgtgatggtgcccagtggctttccataatgtttgcaccctcggtagcagcatgattgggatgggttggaagccattattggataaggaggcgagcactgaaggagtaatcgcacttttcgaatggatctttgccctcggctagcaattgcttttttgattcgagctttcactcaattcaggtgggaggtaccatttaaatattcacacagctagatttcccgatatcgttaatatgtccgaggctcgcacgaacgaaatgacaaagtttctttatcccgggtggtattttgcttcccggtgggaccctcagaaggcgatttgaaaatcataagcggaagcagctgttgggcctaaaaccctactttcggagttaaaagtatgagcattatcgaaccgaaattgttcggggatgaagataggtctctttgaatagtcgccgacgctggtaaaagtggggccgacggtttcccagggttcagataagtcggacttcgcttcccgaaccagccagcccgtttaaagccggaccgaacaacaagtcttccaaatggagcaagttcgtagacattaaatccggtgcagttgatatataattcaatatttgtccaacagatcaaacaggatcacttttttggatgacagcctcaaattttctaattgtgtggtatcgagtgacaatccaaatattttcgcaaacacccctcagcccatcttttgtttttgtctccaacttttcaggacggtggcccagtcggggcttgaagagatggcggcattgaaaaaagagctcgttactcccgataattggtcagaccgggatggtacgacccggtcgatactctccaaacttcgaatccggcacccagatcacgaagtggctcatacccaccgcctaggtcatttgaaaacggatagtgagcacctagtacagtttgacggatcgaacgatccatataaaccattgaactggagcttcaccaagaaaagcgtcaccaccgttctatacggctttatcacaatgggtaagttctcctcggttctttgattattatgttaggtaattgacatctctggcccttttttaggctctgcatgggctagctctgcgtaatttctatggatcttcctttttatctccatgctaacctaatgcagattctctcctgccatctcagacgttgataagcagtatcgaatctccaaggaagttggaaccctcggcgtttctttattcttgtttggagtcggactaggtcctctcttatgggccccctgttcggaagtttatggacgcaaagtcgcggttttagctccatacgcgattgctgtcgcactttcatttgccacagccgtctcgaaagatattcagtctatcatgattactcgtttcttcaccgggttttttggttccgcccctattacaaatgtgggtggtgttctggccgatatttggagttcacagagccgcgctattgcagtgacagtgtatgcactcaccctagtgtctgggacagtgattgcaccaattgtgggtggagcgattgaagtcacaaatcttgattggaggtggactgaatatgtaagtttgttccggtgtactcggcctaccaaaagcaatgtgttataactagatcgcagattactggaataattatggccctctcattaatattaggggccatcttcttggacgaaagttatccacctgtgctgttggtctacaagagccgccaacttcgtctacggtccggaaattgggcacttcacgcccaacatgaagaatgggatgtcactttaagcgagctatcaagcaaacatctggcacgaccatttcagttgttaatgacgccaatatgttttgctatcgctctatacgcctcttttgtctatggggttctctatctcagtttggcttcattcccgatcgagttccaagagctccgcggttggaatccgctagtcggggctttgccatttctaggtcttcttttcgggttcttccttggtgccgcagttaatataaccaaccagagattttacagtcaacgattccaagcgaacaacaatcgtcccgttcccgaagcccgactcccacctatgatgattggttcagtattttttgctgcgggcttgtttatattgggttggactagtgagccgcatatattctggtttggccccatctgcggtgctgtatcaacagggcttggcttcttcaccattttccaagccgcattgaattatctgattgacacattttctgaatactccgcgagtgctgttgcagtcaatactttcctacggagtatatttgccggctgttttccaatctttgcgaatgcgatgtttcataagctgggaacagcttgggcattcagtcttttgggatttgttgccgtcgctctcattccgattccatttgtattttatatatatggcccacagatcagagccagagacagatggtccaaaatatccgtttagcacctgatccgagaagtgaaattttaatccttgaaatagggtaaaagccgccatcatccatctgctgtagcgctcaactcatatcagcttcgagcgatgaacctgtcttgctcccaatcgctctcgtttactttgtcttgtcacaaaccaggtagattaccagaatggacaatgaaaaagtaaaggtctgatagaaaaagcgtgcggatatagtaaaatgtgcaacatagatatttgcataagcctccgcgagatggatcaactgtttgtcctataacggacgctgcagaattttgggttttccttagattgcaactagtttatgccaattgtttcacttgattactccttcccaagcttgcacgagacgagactttacttatttattttaggctgagcggtgagtaacctcggttgggacacctacccaaaaaaacaagtaaaatttcagaagcgccggaaacgccagtagcccaatttttcggagggatggagatcctacactaattccttctcgggtggactttcatggagttagagaaggtgagctaggcgagacaagctgagcgaatacaatccaaaccacgtgcaaagtagcatttctcagagcaatggtgacaacatccttgtggctagccagcatgtcattgaatttcgaaatgttttcacctctgattgtcaaagaaatgtaggcgccaaacgttgtacctcagcgttctaccgattttgagattatattatttccagttcttaacagactctgagttggaaattcaaaactttcagctcatgctggtattctgcggctacacgatgaacccagccaagaacctgacagacggcctgaagtcctttcttcaactttcgaacatcttttttgcttgtttgaaagtcatctatcacattgcgtggtgacaaaaagctctgcaaggcaaagccggcaaggagcagaatactcgtggtcacggagagagggtcgaccatgcttgttaaggctgaagctcagggaacaaattgatagagacataagaacaaataatgcttttttagattgaacgtaaatgatgacgacaagcagtgaatcaacattgtctacgactggcgttccgggaaaactatatgttccttcaattagcccagtgagcatggtcgtggtcctcgttttctccaatccaatttcttggagaaaaaaaagggggagccggctgggccggctggcaatggcccaatccctcaggaaattgcggcagcagggggcagtagcagaaactagaagagacagcatgaagtcagaccaagttagttaggatcgaaataggcacccaaattatcgatgctgttctaggcgaaattcgggataagcgtgaatctcggaggaaagacgcggacacgttaagtcggatttcggatataagcggtataccgagcaaaaagaccacaaatggggaagtgaactccgagggtggctgctgtattgagcgagactatataatatgatagattcctattgataggactgaaattgcctgccctttacagctctcaaatacgaacgagaaaatacctcggtcattgaaaatggggaagaacattcgtttgacctttgcatgcggtccttacgaccgtatggatcctctagctaacaaggctgtcgaccctgtcggaattgatctcaactacatcacgattaatcatccgcgggaaatctttgaccggatgatcagaggcatggagttcgatttatctgaaatgtccagctcggagtatgtttgccgatacgcggctggtgaacgagacttggttggcattccggtgtttccctcgagggctttccgccatagttgcatcgcggtcaactcagacattatctcaagcccatccgacctcaatggcaaaaggataggtgtccaggtgtacactatgaccgcagctgtttggattagaggggttctgcaggatgcaggagtcgatctatctacgattacttggattgaaggagacctagtcaaacctggttcccacggtcaacccaagacaaagccgctgctccgtccagtgtcccgagtcccaaatgaaagcccgaagtcgctcagtcaacttcttgaagagggtgagattgcagccacaattggcgctcacgctccgccatgcctcgcaaaagcatcccatattcgacatttgttcccgaatattcgcgaaaccgagaaagaatactaccagaggactggaatcttccctatcatgcatcttgtcgtcatcaagagagcggttgtggaaaagcatcctttcgtcccgcggagtttattccaggtaatgaatgagtccaaaaacattgctctgcgttcaatgagacttgcatcaacttatcggtatatgttgccgttcctctcatccgacctcgaagagatagaacaactatttggtggtgatccatggccttacggaatcgagtctaatcgcacagttttggaagcgctggtgaacttgctgtatgaccaagctatgatttctcgcaggatttcacttgaggagttatttccattcccttgtgaataagcagtctatgtaactagagagaattgtactaattcaaatccgtgaatgaggcgatttgggccgcagcaaggagaatagtagatggcagaaacgaatccaatggtagatcctagatgtccttacattgtcccccggataactgtcagggatatacatgaagcatacaggacggatggagatatgatctgcgggacccacatggtgtatatgggttcccctgaacgcgaggaagctacctttcctttgcttcctcgcgctacgtcttgtatctagaatagacaatagcttcctcaatattgatcattcaactacgtatacgtgagatcctcacaaggagcgcggcagctcctaggaccagtacatggtgtacaaggtaccgcgatcggcacaggtactaacgttcgcccgtatctgttgacttgtttcctgcatcgaagcggcgtctcgagaagatgtgctataatattctctaatacatatgtatacaactcccgggtttatcgaatagaagcatgattcggtagaccctagagaaacagcgaatacgcctaagggcttagagtaaaggtacagggattttcccctgcggtactatactcgggtcaggatttataatcgaaaatccatcccatgcgcgatatcctcaagctagccgtccagttccccgcgtggcggtcagggctgccacattctatcgtagctgttgacatctaccgcccaggattataggcagcgctagccacaggctatacagacggggttactggccgaggggagcatcccttcgtacacaagcagtcggcagcggcaacgaaaatggacaggcggcgagcagtccttcgctcaatttattcaggaacatatcgcgtgggttattcagttttagctttcgtgcgactgctaggataggcccaaacgcccgttatatcgagattgcggctcaccggcatctcacgagcccggcaaggtataggcagcaaggctaggcacgatggggtctagtaatggttcaggctggcgatgtcgataacggttttttgggggacatttcggtcgcgggcttgaccgtcagaatcgtttgcggcgagagcgctgcttcgaggacgaggaaggaggtaatagggtgatttgggcgggtcaagcagagtagactagtgatgcaaataaagcgaagttgctgaattggtcgacaacctaatacagttgggattttctcgggcaacttagcattctgcaagatgtatcctttgtagatggctcgagaaatcgcgtggagaggctcgcacgttctggactgagacgctcgggtcgcgtcgatgacgcgcctggtcgggattcacgtgacggggggttgtctgttgtctgtctccgcggactgaccaaatgagatcgaatttactagctgttcggttgcaattggatagggctggccggcctgatctgccatgtaaagtccaaaatgctgaaagctgagccagtcatgatgcacggaatgctgcacgcctgccctgaagggcgtacacgctgttcgggtctgtcctgaattgccgttcctcacagagattccggtctatctgctacctcgtccataatcacttctctcgtagctctccacgccgaccacagcgttctgtcatgtgatacccttatcgccaaacacagaaaatcctctatttttcaatcatgcaaaaaactgcgtgttgatttttggaatccttaattcgacttcagcagaatccaagctgaaccccttgcgtcacgtgatgaacttacggccgcggccgcaacgcgtactagagttttccggaattcgagaaggccatgatgcgccaattggaatgttgctctcttttccccttgccgctgctctcgcacgcctagaatccgctcgatatttcaagagacggcacgagttttgcttgagaccgcaggggaaaagatacacttttgtgcttggtccgccgatagttggcgcagggtgctgaagtcgaacacgctgattacaaccgtccgttttctcgtctgaactcttgcctgccgttgtaccagcctcagcctcgccgtcgcgtgtattccttgtaatggcagccgtcgcatgctctgaggcacgtgtcgggtggatgatcgtgggaacgaagagagtatcatctggcataccaggcttgacgtagtcatcgaagtcaacattgaagtggggacggtctgcaccgggactttatggagtctcgcagatcggcttgcttcgatcgcggatctttggacaaagtgcaagggcgtggatccgggcaaggacgtgcctccgatgcggtggaaatcagtgtcatcgtttaggccgtgcgtgttatgggacttcggtgaaaaagacgtatcagagaagcgaagaaagactgcccgcctgagatcgtgaggtggaggtcactcgacctcgtttcgctgaaaggagtcggggaaattcgctggcgttgagctgcttgtcataaggtaatatatcatattgtcggtgctcattgtcggctcaaatcgatggaaggtcgagtggtgtctcgaggacgtctcgatcgggagtggccaggcagatcgatcgcgtcgcgcggcaaggcggtgagggtttgcacgacgcgctgtacatgctcctactgggctctagttctagaaattggcagggacatttacaatggagttacattaaagtatgcgaaatcagaaataaaattaagcaggaattgcgtgtatatatactcggtactgagagaaagattcaaaatagtaccaggcaaagtagatgcgcgcgggaaccaaccacatccaccaaatacccgcatgtcaccgtatgtaaacttggttgagccctgaacgccctcccccatgggatagccctcggtccgccgtctactagggtatatgttcacctcctgctgggccattgctagaacgactggacggcgatccgaagaagtcgagacatgctggaagctcccgaataatagctgtggaatcgttgttggcttctgacgagatgggaattcaaggtcgggatccaccccgagcagctggcagatccggccgggtgtgatctggggcgggccccgcagtaccggcggccagggccggtggaatgagacccacagcgtgctgatgcgtgctccgggccgccgtgctccgggctgccgtgctccgggctgccgtgcaccgtcttgctcgtcgaggccggctagggaactgaaagttccctgctgcatcacggagggttccggcgtagccctcgacttgtttcgggctccgacactggctggacacgaggaagcgaccgggcagggaggagcctcgggatgggacgcagaaggcgaaggaggaggcagcggatcgacgggggcggctgggacgatcaggcgcgtctcgacgggccgaggaatcaacagtccgtgcggatcgatcacgcagcctatctcctccccctgctcggggcgcagcatggccgggactatatcgtcggtcggcatgtcgagcatggacaactcgttcagccggtcatgcgcactagtgatatccccggtaatcacgccgggccgccgcttctggccctgtttcccgtttgtgcagcgcaggaaggcgacccagttcacccagtggcagaattgtggccagtccacgactcgtgcggcgaggaaggcacactgcttggcaaaggtggtgccgtagccgatctgctgcaaccgcgcgacggcactccactcaaaccttttgtgtttctcagtctcgcgggcgcgatcgaccgcagtccggatgggcagccagaccgatttgtcgtccgcgctatacgtctcgaacatggccgtgcactcaaagatggcgaaccattccatgatggttgcgtcgagtgtctcggagagcttcacgaactgatcggcgtactccatgcagaggctgtactgctttgcggggttgccctcgagcttggtgaagctggttcggaaggtcgtgagcaagctcaggatcttcgccggcactcggggggaactgctagatgggagacggacagtacggtgctgggctcctctatgacgagtgggtgggctactcttctggtgatggttctcccctggactctctctgttgttctttttgctctctgtcagctacttcgagtttgcatcctgtgtcattctcacatctagtaaaggcaaaaaggtacgcaactctttcccaccagattatggggcctccgagatctcttctggtaatgggcttaacccggggggtgtggttgtgtatgagagtgtggtgggtggtgtgggtgttggttgggaagtgagagaagagagagaatattttcctcaaagagagagagggagggaaaaaagcccgacaggagagagtaatattcccctccaaatacattcatacaatacaacatcgaacttttgagtactcaacataacgagagagacaaggacaactccacggacaatatatcttaatacaccacaacccgagtccgaggtaggagaatctgtgcaaacagcttctaaagtagaaagtcattttgcttgtgtgtggtgagtatataagccgggccttttcattttgtccctttcttctgtcgagagggcaatcaccgggaaagagagagagagaaggtattagcctaggacgtatataagagaccacacacacacacatactccaaacaggccaaggcattctcacactctctcatctctctcatcccatcccactgttatcctctcggaccccacacgacgcagaggaaatacaaaagccaaatatcaacaagagttactcccccgtcgatgggtttcactgcgtgcgggtcaccaacaaaaaggtcgggtgccactcacgaccgtttcttttttggcgtgtgtggtcatgaaacggccagtcgacctcgggcattgcgacttcgaactctcccctctgaggcttcacttcagcgcaaccgcatacttcactgaggcagccactggaaccgggcccagcctcggccacacaacgatcagcttcagccaatggatagaccttcgaaccctctgggtgtcccaagcaccacagctggaactccgtctctttgtgagctttgatccgatgatcaaggccgccgaacccgcgtttgccaccgagctggtccgagaaatcggccttccagaggtaagcggctccctccgtcggtcactttcttgctcgcgctcaatcgtgcttcccgggggatgaggcccttccaagtgataaccctgagggtattaggtctggtccggcccaggtgctcacagcatgcctggcttcggtgaatatacatctcgaatatacgagctgcaataccacgccacagccagagaattgcctcgtacaaaagtccctggagctattgcgttgcggcctccggaaactgtttctatcgggcgcgcccccgagccatgatctcaggccactcggcaatgggaggctgcataagctaccctcactcgcgccggcagtctttgagccgaggtattgtgaggtgcgttatcaggggtagattatgatacaaccacggtacatatgctgatcggatatgaagggaatggagcaaagggctgtatcactcgctccaattacaacctccctcctctcaatgctcgagagtcatgaaaccttacagcagatgctcgtgatgagactggtaaggcccaccgaccgggatggatacgtaacaccggaatccgcatacggagacacaccggcgagcaaagccacagaccatttgggatgcctgataaaagtcacactgtggaagattgcccagcaccaactcgcgcgcctcaagacccgcaagacggctatgccatttttcaggttacccattgagctaccagagccgtcaatccatccggacgacgacgacgatatgcccccattgctcctgtcagaggaagaatttgattctgaagattctgaagatcgaggcgatggcgacgacgccaacggggatgatgacgatgacggtctgtgaggaaggaggagtgtgttgaagagagtaggtttggatgcggaggaaatgaacatctgcgccaactaggcagtaagaattgattgttggagactcaaggatttgaataacccctgatcgaaggagtactttgtactcaccccaataccactatctgcaagacaaaaacaatattgagcaatacagttctttcgcggtgaacaagcgtgattcctcaacagagtaatgtaagtggcctgccgaggtcgtaagtgactacatatatcatatgacaatgcagcaccaggggtctaagtttatcagatccgatgaattactaagctcttcttgctgggctccttgcggcataggtgacgctactaagaggagccattgaatcaattagcggctagtcaagagggttatattcgcacatttcctattctgtcgcttgtttctcctccaacaaccgcactcggtcgcggattgcaaacttccactccttcgctaccttatataccagcagcaatcctagtacgaagagagggctgaacgaggccacaattgccgtgacgctgatccagaccgccgcatccatcggccaagtggtgccagggtccactcccacagagacgacgacttgtaatccgctcagaaccatggaaaacaaaccgatcacaaacaagataggcccatagaaacgcacgaagtaggtcctatactggtactcggctctctggaagtccgacttgccgaggacaattgggccatagaaatttagccgcatcaaatgaatctcaccgtttacataacgcaaggagacatcccggtctgggatgccggctaggctcgacttgaactcgcaaaactgctcccaggtggtgtcccgcgggacaaggcacaagctagggtcctgcgcaatgcgcaagtcggactcgtgcagtcggtgaaggattctgcccaacccagcgatccaatcaaacatttgagctcatgatgttgctgaacgtctagggaagaagagagaggataccagagggacgcctaccatcggctggcccagcgaggcaaacggcggcggcctggaacctgctatctgggtaataggggcaacatgggcgatcatggtctatcaccgtatgggggctaatgcttgctacttctgtattcaaggagagcgtagtgtatcaagctgtgctggttcgttatgaaactcactaaagagtctaaaaatagaacatagaggctagcaatccataaaaaaaccccctaactaaccccggcaccgcggaattatgtaagttatcgagcgaaggaaccctgaaggtcagtttgactgactaatctcggatttggcggcagtaaaggcaagcagtacaccatcgcctagctcagcaacgcgaaaagagaaaataggaagatgcaagtcgtgtgagactcaaaagaaacagtggtcccactccgtaacaacggccgcgatagtcccaaaacgtctcctttcatcagcccctatggtctttcggaggtgtctggcctcaagcgacaccgctgcctgggaccaccgccttgacaacgtcagaaagggtcactgaactgcttccgattaggaacggtctgatcgatttccgacgagacaggatctgataggttctgccgttgtcgcctgactgatcgaaggaggatttttgcggtgcggatctcatctggtagaataaatccccccttgatcatagggttgggatggttgaggccaggaggaagatccgctgagttccgctggcattctccgtctggccagaccgtgatttttagttggaaattctgaaataagagtgggcggcacttttcatggacacggccaatgcacaacacgcttccagagaaaccccgcgcatcgacttgatcttcatcagttctccacagaatgctagcagaagaatcaacggcattctgaatccatatatgcccatggccctcgaggagagccgcccggatttgttcgttaggaatatccccgagcaggcggccgtgttcattattgatataatcgaagacacaagcaatcatcggtgctccctggatcgcgtctttatatgaagcccattctggcaccatctcaattcccttcggtgggtgaatatcaatcaggttatcgccggtaataagggaaaggtcgtgacggtagccggaggggtatggatacgtgctgcttgggtcatcatatgtccgcgtgataagtccgacctgtttcgttagaaagacttcattcaaggatgggtccgtactcaccctacggttggtgcccgctagccagcactgcttaccgattgggctcgaggaaagggggctaggcgtagtgctgacttcgacctcccgattctggagccgtagagggatttgaaaccgtgtgagagactgtgtgactcgcttgtaaaaagaggcaacgcgggtaaagaatgtagggggccctgggagtctcacaaaggcgtgggtagggacggtgatagcctccgtgtggtcaggaagccggatcttgaggcccaaaacgccacagacctcgtacgcattcgacatgcgcgcaagctgctgaccagactccgctgttgccgccgacggttgcattgccagaacggtatacccgactgtcagcctgccaacggtcggaggggtaccgaagttccatgtatgcaacatgtcatcccgacggctgaagaggataaccacacactcaacctggtagataaacgctccgatggacctcggaaatgccgctcttaggcacttaatgtcttctggcgtaaaagcctgccggacgtcgacgtctcggcggataggatccgaaatgatattgcaatactgcatgtcgtgatctactggagactcaaatgcaggttggatatggatttctcgaccgccagctttaatgaaaggcacatggctattttccggcaccacccaaatgtccttgcctgagtccttctgggtcaggacgcagacagctctctgagatgagaaagccgggtggtaggttcggaaaagttgctcattttcctgggtgatctgcggctcaataagagcgcgagcttcggctacagaacgagagccccacaaggtcgaggttgtccctagttaccaaggttagcaccatcgcaagttcataaccagcctcaaataaaactaatacccacgatggacctggcgtaactgtcgacctcggtattgaataatctgggaaaccggtcggggatgctcttgaacgcacgaatacgtcgccatggtcggtaacgtaaggaaaaggaggtgggtgaagcgatgagaaagggtagaaggaatctctcccctgcaccaacgggctatggacgaaaagttccacaactgctggcacgatatgttttctggtgctgaggagcggtgtatttgtcagtgaagggaaagcggcggggggtcattggagctgggtaaatcgggtcaatgagaagcttccaaccgaagaatgaagcaggagcaagtacgtagatatcacgacgaaagaggtctagcgcctgtcggaacagcagcataggtggatccccggaggcaggggatactatcttccgtcaagattagtcatgcatttgagcccatctacattgctagttgaggggcggtgtgggtgggcagaaaagcacagatataccctgcaccagcatgacccactgagcagtattccgattctcagctaaccattctacagccgccccgcgccatattgttacattttagctattactcttcatttcctaattatatatactcctactaggctctagttctagaaattggcagggatatttacaatgcagttacattagagtatacgaaatcagaaataaaattaagcaggaattgcgtgtatatatactcagtactgagagaaagattcaaaatggtattcagggcactcagggcggatattcacccacctgaatcttcagcccgtacagcaaaatttacattctcacttctgatcgaaatgctataagtaacctttcttttcccctccgcgttcatctctcaagcctcgctttgtcacgagcaagatgcgtaccaagcgtgactcaatgttgaataaccaccctcatttttttatctcccttgtaagtttataatctgcaagatgattatgatccgagtatccattgcctcacacgcgagaggccggccgccaaggtctatctgctacacaaatcagcacacccaagaacaattcggaagaaaaggataagacaattgacaacatgaaaaccgctggtttgaacttgaaatcaatgtttttatcggagtagaagaagaagaaggaggaggagctggatgctgctaatgtctcaatgagaaaagaactgaaagccgtcaaacctcgacttgaaagataggaagctttctttttctaacactcggtggttgattcggaatttgggtatcattgttgactgtatcggtcgagaccaggtgttacacctgccaatttcataaaaagaatacttgttgcgttgagcagaccggcccaactcagtatcatgcgggggtctaggatgtcttaccgcttgtagccaatgagagccgatacttacttccgtctgatttgcaacctgccaatcggattacggcgtgattcccttggtaggggggacggagatagaattagtagtatagagatagatgagccagagttgccagatacaattacgctattccgggcctctcagagaaagcgtaagagtagggtagatgatgatttatagctatactaggaaattgtattgagtttactttctcctgaaaattttactgaaaattttgccgagtcctgctataattacaatacgtattgttacaggcgaggatgtattacttgtgcatccgtgcagtaggggcctgtttgtcttgtttgccttagatttgggcccgaacaggggtccgaaagcccgcgcgggcccatgggctaggcccgtgacccgatcacggnnnnnnnnnnnnnnnnnnnnnnnnnnnnnnnnnnnnnnnnnnnnnnnnnnnnnnnnnnnnnnnnnnnnnnnnnnnnnnnnnnnnnnnnnnnnnnnnnnnnnnnnnnnnnnnnnnnnnnnnnnnnnnnnnnnnnnnnnnnnnnnnnnnncgccgcgggcacgcgcgcggggggggggccgggtcgggtcgggtcaaaacgggctttggagaagtctaggaacaagataagcagtccgaggggtagcttgatgacagacttcgaaaaaaaaagacaatcgagtgttcaatattcatttcattctgagcgccgtaatttcaaaaccaagtgtcatgatatttcacgttaataacagatacaaaaaagtagttgacgagactgaaccaagacaaggaggaaacttagtactgaaggagcggcagacatacccgaagtagtttagcgcggtgtgtgtcgcaagtaaaagagtgtgcgtagacgttctcttcctcgatcgtcaatctctcgcgatagttgcagtagaaatacgccagtctgatcgtactatcgtgccgtatgcgacgatttggatttcgccaatcacaccggaaatcatgagcgtctttccagtccctggggcactgggacagaaaagggtgcgccacattgtttgatcttgatcttgattggaccaagggacgaattcgttcggctcgaggaaccatcgcccggtaccgttgagccagagctttaacttatcgtcttgtttcattgcggtattggtaggagagatccacttcatgagatcaagtcggtccttctgattgagatgctgtactatctgctcgattcctttctgattcaagactgttatgtctttggtttcttggataacttggctagtcataaaaaataaggtcaaatcttggaccctttccccaacttggtatcgaagttctctcactgccgtttggtcctatacaaaacgcttccaaaatagcttcattgcggcgcgaaaattgtttgtgttgatattaaattccccataatcgtccagtttcttccggatatccctcagtaagagttagcatcttttgaaatgtcatgcagagtatggttttgttgctcactcaaatgatggtcataatgctgatcagccagattgaaacatatttgacaatgtttcgactctgtttcgactctgtttcgactctgttttgtcgtcagcaactataatatcggctgtactagaaagctggatatctcactcctcaaaaatgatcctgtactgcaacggtgcatctttgaattgtttccgcagctcattcgcaagtttgaggaaagtatacatgtcacccgcaccatacccaaaattctttctagtggcagaatgtaaaggtatacgttatgcgggtgtaaggcctgtccactgggtaagatacaataggctttgtgggaggaacacaatgtattgatgttgtgaatgtattgatgttgtgccacttgccagtctcgagggggtcccgaactataaggaaatattaagcaaagaagcaaacacataatggcaaataatctatggaattcaaaccgataaaccatgcaggcagtaagcgagcaagcaaacatcaagcatataatagcgatctatcgtatattgtgacaagagctagcaaaccacctgaaaaagatgagataattgaatttgcatggtgccaaatgcttcatgatcatggggtcatcgggcctggttaatctgtcaaggaccctgcgcactatgcccctttgtaatacattcttagatagcttcgtaggatcgatgatagcgtaaatacttgtccaaacaccgaacgccttgcttcccctcccccaattcataacatttggaggatcatcagttcatatcataacatgatcccctgcaccattcatcaccattaaacatcgtcactcactagcaactccggtgggccggaaaactcgatgcagatacaatcaccgcaatcgctaccgcctgtgtttcttcgatcagaccagattgatgcaattcgaagttgaaagacttaccgtggccatatccatgcctggcataatcaccatatccatggcaggtcgatatcccgcctggcagaaggacaacaacgctaactttttattatgccgaatactctctttgatttccataatcctacgattgtcatccaccacgtcatacatcgtcagaacccggccatggctttcgaggtcgatgggcaaattgcgttccttcacgttgcaatctacctgtatcaagttctcgagctccagatgcagatctccgccgagactgtgccgaccgatggcgatgggggtcgtccggcaaccgggaagggatacggtccatgtattgcgtacccagcgcgatcgttggtggatttcgaacaagggtagacctgactgatctcgcacctcccgacaataatgcgggctacatcttcgcccacttacggtgaagagaacggcgccattttcatcttggatggaataggcgcattcggagacggcactgccgcctgggtatagggtgagatgcgtcttctgctctgtcatgtattcaaaacgcaggccgattgggcgcagaggctctttggcaggcttgcgaatatttttgttacgatttctcgtggggaatgaggcaacggatacttccgatgtttcgcttgcgattcgcgtgggcttcgacatggtcgttgttgttaaacggaatcgagacaattcagaccgagtccatccccgtcaagctttctgaaatgatatttggacacagatagaatcgtagaggtcgccctcctgtgggcctctgactgagtacctcgacggactaaacacttccgaccgccgtgtcagcaggaatgtagcaggttgccgtggaatggagaaacccgatttgaaccgtcgcagtcgaacggggcctagatttgtgcaaaagtgcagtttttctgtatggaggaaggactacacttcatccgagtcgtgagaagttcacctcggcaagctcatgatatcatgatgtttggtcccgacccccactgtaccagcagcctctccatcctattcaagattttgatcaatcatgttcaaaacagaaaatggtcgaaagtcaatcaggtctcgtatgacatcagtcagatcaagcccaagtctagccccaaggaagggcgggaatatcctggaagttttattcgtgagatcatctaaagcagtggcagatacaatatagtatagtttattttaagttctttcgcctgattggctggggaacagggggttctccaccagaccggctacttcggatcttcagatgtgcagatgtgtgggggtcatattcaccacggaaggattggcacggaagaatcggcatggcatgctctgctagcctcactgaattcgtgatcgaccttacgagattgacagactcattgggatttcaaaatcaaaatattcggttgatattaggcgcagcgcaagctgaagcatggagaattagatacaatttggtacgcaatattagaaatttcctcagcaaggcacctccctcaatccttaatctccgtaatctcccatttcgcgcgctcttccctccgatccttcacgaccttttgtataatgagggcgagaattccaacacccacgacaaagacaatgcaaaacacgagaataggcccgggttctcgcgaggcccaattgcgcctaacgagctcatcgcggacttcgatacccctcgcgggggaaggatgaatggcagccatctggtgatgcagtttttgagagcaacgaactgagttgagctagatccagctccgacaagtcagaaatccaacggtgtgccatggttgaaaacatgatcatgatctagtctgacttacatggagggtgggtggtcgtaaatatcagagatcagaggtgttgagcagtctgtgggagagtgctcgaaagaaggtgttcaacaaggaagatctagggttgaagagatggcaaaggagcaggcaatagttaacaaaaaccctggagcagactcttgctagaattcaatgcggaagaagttgtctatagcttttccggttctctgacttctgtgacgacatgagaagggctcggcttgcgactttgtcaatatcaatcctgattattgatacggagtactgagcttagatatcgcctgatgttacccacatctgaatatacgacgaatagggtaaaccggatgcttcaaatctttccattctcggcgtcattatcatctctctgcaccggcatgaacggaccggtctatgacatcaagacgaaagcttcttttcgtttgggaaagctcggattgccaggtcagtcaggtccacctcgagcctctacctcatatagtccagcctctgtcgttttaaatcctactcaataatcacttcgtgagaggatcactgtagcgagtgaaaaataaaatccctctctccccttccgttcccctgtcgtcgctgctctcgtgcccccacgagacctgttttggagaatgtcgtctgtatccaatcccaaccgcgacgtcgaaaatgacgctgcggagcgccgattctctgctatttcctataaggaggatgtgaagatcgatgaatacacgcgcctggtgcgatggatgtccacctaccgtgatacgaaatgggaccaggcagatgaaggcgaaattcgcgagagtcgcgtgtggtttgcgccatggcggaagagaaagttccgttggaagtatatcggcgtcggacaggagttccccgatgactggaagttcaccgacatcaatcacggtctgtcggactcggaagtcgaggagaggcgaaaggtgaccggattcaatgaattgacggcggagaaagtcgatcaattccgcaaaatcttgggatacttccaaggtccaattctatatggtgagagactatcgcgtccccgccgattgaacgcagacagtgacacactaaccggacctcgacagtcatggagattgcagttttgctcgctgccggtttggccgaatggattgactttggtgtcatcattggcattctctgtctgaacgctgcagtcggatggtaccaagagaagcaggccgaggacgtggtggccagcctgaaggccgatattgcaatgcgcagcacggttgttcgcaatggaacggaaatcgatatcttggcccgcgacctggtccctggcgacgtggtaagatgagttccctatcctcttgactatttacctctattaacacatcttgtcatattcagattgtcattgaagaggcgaactcggtccccgccgatgccaaagtggtctgcgactaccaagagaaagagacaggctggcagaattatcagcaaatgcggcaagaaggcaagctggacaagaagaagaagaaagcaactgaggatgatgaatcgtcggaagaggatgaacacaaggacttccccgttctggcctgcgatcactccgcaattactggagagtctctcgctgtggaccgctatgccggtgacgacgtgttttacacgactggatgcaaacgaggcaaggcctatgccattgttcaatcgactggaatcaagacctttgtgggtcgcacagcggcgatggttcaacaaggtggctccgggacaggacatttccagatggtcatggacgggattggtacggctcttctggtgcttgtgatggcatggatcttgatcatgtggatcggaggcttcttccgcaacctgcccattgcctctcccggtcaacagaccctcctacactttaccctttctctgttcatcattggtgtgcccgtcgggctgcctgttgtcacgaccaccactctagccgtcggtgcggcttatttggccaagaagaaagcgatcgtccagaagcttacggcaatcgagtctttggctgtaagtattccatcccgagtttctctcacgaccgattttcaagccgatcactgacgccgactagggcgtggacatcctctgttctgataaaacaggaacattgaccgccaataagctcagtatccaggagccatacgtcgccgagggcgttgatgtgaactggttatttgcggttgccattctagcttcttctcacaatgtccgttctttggatccgatcgataaggttacaatcttgtctgcaaacaaatatccgaaagcgaaggaaatcttgcgccaaccgtggaaaaccctaagcttcaccccatttgatccagtgtcgaagcggattgtgtcggttgtgaccctaaatggcgagcggtatacctgcaccaagggagcgccaaaggcagtgcttcagttgacaaactgtgatgaatcggtagccacgttatatcgacagcaggcgacggattttgctcgccgtggctttcgatcacttggtgtcgccgtccagaagggtaacgaaccatggaccttattgggaatgctaccgatgttcgatccgccccgggatgataccgctcagacgattttagaggcccaaaatcttggaatcgcagttaagatgctgactggcgacgcgattgctatcgccaaggagacttgcaaaatgcttgcgttaggaacgaaagtctacaactccgaaagactcatcggtggtggtcttagcggtgcgatggcaagtgaattatgtgagaaggcggacggattcgccgaggttttcccagagcacaaataccaggtagtcgagatgctacaagatattggtcatcttacagctatgacgggtgacggtgtcaacgatgccccatcgctgaagaaagccgactgtggtattgcggtggaaggcgcatcggaagcagctcagtctgccgcggacattgttttcctcgagccagggctatctactatcattgattctatcaaggttcgatccactcaactcatcaatttctgcacattgatcactaacttgctgctagttggcgcgtcaaatttttcaacgtatgaaatcgtatattcagtatcgcattgcactctgcattcacctcgaagtctatctggtcactagcatgatcattatcaaggaaagcatccgcactgatttagtcgtgttcctcgcactatttgccgaccttgcgacggtcgcggtggcttacgacaacgcatccttcgagcgccgacctgtccaatggcaattgccgaagatctgggtcatctctgtcatcctcggtgtcctcttagcactcgggacgtgggtgatccgcgcaacgatgttcctgccgaacggtggattcttccagaattggggctcaatccaagagattttgttcttggaggtcgcattgacggaaaactggctcatctttgtgacgcgtggaggcaacacttggccctccctgcctctgatcattgctatcctcggtgtggatgcactcgcaacttgcttctgtttgtttgggtggttctcgaaccaggatatgataaccgatccctttgatcaatatatcaataaggagaccagcaatggtttcacaaacgttgtcgatgtcgtccgctgttgggggtacagcattggtgtgactgtggtgctcgccctcgtctacttcatcttgaacaagtggaaatggctcgaagacttgggtcgcaccaagaagagcaaaggcgatattgccattggaactatcctcagtcacctgtccactatgagcctccaatacgaaaaggacgcggcgaatcatgggcgaatttggctcggcactaccaaggaggatgagatggaataagcctcaacttctttagaaagacatcattttgtggttcttgttggtggcagcgcggttgattggggagagtgtggtcatatggattcatgggcatttgtcttacgatgaccatcgaccgtgcaattttctattaatcagaagtggtttccaccacttccctaattcactaataatctctcttgacattttggcaatacaacggctgactcgtgtcaccatttacattcctttccgttttgccttaccctgatgcttataagttagatgcaactgtttgccattctctgtactagttatattttgctgcacttcactcgctgcctcatcgtttatatagaccattttgtcttgcgacagctgtgatgcaattggaaaaaaattacggggtcacctttgctcagctgtatgcgtgaaaccctgccatcggcgatgaccgtcaatctcttttgcaaggttatgcgatttgtattgcctccactacgactatcacaaccaccgctgcgccgacacaggcgggaatgaccccttcttgtacataacaatacacggtcaagtccggcgatgggtgtgctgcgattgaaagtacacagactgtcacttttgcccagctttgtgcttggagcgacgccatcggtgacgatttccagtatctttcacttggttacgccgtctgtgccgccatcaagttcacttccccaaccacgacatcgactgcggcaccgacaggaactacgaccagcgtatcttgtagtgaacaatacactgttcttcaaagtgactcatctgctgtgattgaatccaaatagtaagatactgttggtccaaatatagcatcagttttgccggattcaacaagcggttctaaatgatgcattctgacgttctcattgttgccctatgcagtttgcgccaagacacgagttgagagactagtgtaggaagtgcgactttataagttcgagttgcgatgcgtaactatttagtgaagccttaataactaccaacattactaagcatcacgttttgtttagctatgtaatcgtggatcacgcgggataagatgacgacaacgattcgactttccttatttgctgttgcactctatgcatcatgcaagttcagcagcgcgttcttcgcatagtagcagacccgaatcactttttctctaaccagagcccgagttcctttgaccagctaaaccttggttgataactcccaaacatgtcttggtatctcaacgcctggattattgagaggactgatcagtctaccagcagcccgttttcccacagagatgtggaagacacacgaactcattcatctctcccaccaaacgcacactcacaattgaaggtcttggtcgccttttccacaataaagcgcttagatactatttcgagaataaggtaagagaacgccctgctactcaagcctgccacaaaaccgcatcagcaacagagtcattttctacattcttaaactcggcatcatcattgtcatggttcctagtagaaatgcagccaaagcggacaattgcccgtgaaggctcgagcatgcggcctttggttgcctatgaaagtgtatttattggctcctctataacacaaactacctgcaaagtccttctctggccgaaatcctacacctaaagttggctgtacagcatagctgtctcatgcataagaccatgattagccagcctgccccaggtcagcacaccactcttttgctgaatttcctcgattccaaactaacgatctgaattacggggttaaatctttgcattcttcgagatgactacgacgactcgctcagcctgtgacaaatatgcgagtgagcatctcggtggctatgtgatgcattctgaggagatcactgtcgccccatgcagtttgtagacctctccgtgcggcattcctttccctttctctttcttcctctggaagataacttgccggcaaacgcgcagcttgccgcgtcggcgttctctttgtatgtctgcagagatgcttctctcatgttctggtggatggaatctggcttgctttgtggtgggaagctatatagacaggcttcagtacagtagctagtttcagatcttccatcaacatcatcttttgccatctggttgatcacttcttccctcgtagtcaaaacctctcaccaccatgtcgttccagtcgacgtgcaagctacaccgtggattacgagccgagaaacaacgcgtgtcttttagtccagcaaagcgatgcttggtcaatacatcaccgagcttgacgaggcggtcccaaatgcggagggcatcgaaaatcccatattgaagcttactaccatacaaatctctaaaatctctagtttgtaggcgttgaagctctcgcaatttcaaaacattctcatcgattcaactgcatcttaaccgcatatatcatcatatatcctcatcgtcatctgtcattatcgattccaatacccctgaccgtctatcgcccacgaataatctcgaccttcacaaacgtgagatgcttcatcttctctccacccagacaacgcatcattcgtaaagcattaatgtcttgggcttgaaaaaaattgaagaattcaagatcaaccatcacggattcgagactcgaaattcctgccaaaatttcaagtatactgttcctcctttactgagatctgtctgggtaagcatcgtacagcccgtcagcaacgcgaatgttgctgaaagatacttcaccctccccattctggaagaaccgaatcccagtcgagttctgataccaaggccttccgtcgagttagtttacgttctgtggaaatgtgaaaccaaggggataagggaaacataccggacccaggtagacagcacaaagcgagagttggcatatacctccaggacagagttgtcgaccaaaatggtcaggctgagagtctcgatgcgatcctcgcagaccccattcgatgaggagttgtgggcatgactttccgatgaaatttcggacttgcatttagtcgaataaggttcaccatgcttacccttgtgaccacacccgtggccgccatggccacaatggccgcaatcggcgccacagcagtcattgatgtcaaatagacgaagacgccccgactccggtgacttgtcgatgccggtggttgtgtttgcagcagcactcgtttcagaacgatcaatcatgatggactcgttggagaactgataataaacggtggttgactccaaatcggatgccaggatctggaaaccggcttgcaggtcggacgaacgtgcaaggaagtcgatctcagcctcaagaataaagaactttgtttccggggagcgaccgaacgggattatacccgaacttgtaagagtttggtctggctcagtgaagctaggggcagccttcatagcgttgtacggctcccgcgcgatgtcgattccgagtgtttccagtttgacgcatttgcccgtggagggtgaggaagcggccaaacgccacgagccaatctcattcacaagacggttgttgaccacattcgggatggctttgatgtacaactcgcgcgacgtcaacaatgtgttttgccatccttgttgctccgatgggaagcccacaactcctccgaaaacatccccagtcaaccatacatagcttataaaacgatccggggcaccgctagcggtagacgcttgggaggacgcgggtaggactttgcctgctgctgcataggccgccaagccccagtcaaggacacccaccatatcagggacgaatgtcacgttttcaccctcgggaattgagattgaccctgctgcccaaagctgtgcatgtagcgaggagattgagggctgaatgggcacgtatgagctctctactgcaatggtcatgaaaggactgccgttgtggctgtatccttctctgtcgaggccgaagacgttgctagtctcaaaattgtagccgaatacttttgaccagtcaccattgccccatgttgagttggccggttcatggtaccattctccaagatactcccactgctcaaagtcggggctagtgttctggtagaggaacaggccaggtccaatctccttgaccccgcctgaaacgattgtgtaccaagtaccatctgtgttgccaaggatttcgtcgagtggtccattttgaaaaacaaaagggtcgcggaaagccgttacatccaggccctctgggggttctgggataacaggtggaatttctagcttggagaagttttgtccaccgtcgtaggtgaccgccagagactgcgattcgcttcctcggatataaggaagcgtccaatggattggcaatgccgagaccgaggtgtataaaagtgtcggttcgccgtcaactccagatgggatgaccgaaccatcgaaaacggcaagggggtcattgggaccgccagctacgattgaatagccaccattagggttgacatcgtagaaatggactaaatcatccgtcagaacaccggcgatcccggtaccattgtggagaaacccgacgtggaagagccctgtttcaggatcattatagtgcgcgcatgggtcgccgatctggccgttgggtggcagcacatgggtatgcggcctccaagtctcaaacaaagacagcgggggtagatccgcgagattcggaggtggagcattgtagtcttgagcagtggctcccgccgagatcgagatcaaaactgctgctaccttgatgatattcatgacgaggaaagttagatgagaaaatacctgcgaggaatgaagaactcgttgtacatgaatcgaactgatatttatattctacaagagggcgattttgtctcatcaattatgcaatttaatcacaagagaaatagcgcacattctaatttcaacgacagtgagggggtagccatacatccccatactggggtgatcctagaatgtaaacgaactccccgacaaatttcattttttgggggtagccatacatgtgcatactgagggatcctagaatgcaaacgaactctccaatgctttcattcttcggggggtttaaatgagtggcttgtgtaatctcgccgagacaacaacaatacttagatgtaacgacctatataagcaaagcgaaaggaatgcgagcataccttgcttgatgtatcatattcctcctagagcgacacgaaggtagtattgtcacattcctcctaagatggcaattctaaattatactgttgatatgaggcttacattcaatcatgtacgtgccccggatcagccagactatatcgtatattaatgcgaagcgtcaacttggagtatttgcagaaaatctccctaggctcaagaagaaatctcaatttaccatcatgatcccactccccttggcctacattctgagtccaaatgcaaatactctccggtaaagtcactagtagactcactacaacccgccgctgttgataaatatggagatattgtccgagatcacagttctatagctccaacttgtgttgattatggtctgacaggaaaacacatgtgacaacaccaacatagctctgtttctctggttctcttctgtccatcgatcatccaggaaaatatgcgtattgtttcttcctttcattccgtaatttcaatattagagatcctgcaccttcctttctagttcttacccattgccatatgccaatactctcggcgcgcattcttaattcgactgggtatgaaaaaggctggtgggcgaagttaggcagactatactaacaccttggtggttcttcatgccagggaaccgaaagaagcagagatatgcattagggaaagaaatttctagatccactagtcgtagaacatgcacaacgagatatcatgatattcgaaagctcattccttatgcgttttcaaatcctcgttcgaaaatggaatcagctgaggtgtgagatctggggccctatggaactttttgtcaaagggccacattggacgggggatgcgacgatgcccaagacgctgtagatcttgatcaacaccaccaggagtcaaaccaagcatccagtctgccgccatattaaacagctctggttctagatagccaatcttgactatgacgatatctgatgttcgaggattaaggtcaagaccgttaaagtcactctcatggtgatatggcttgcggaatttggtcaggatagtaaacacacttccaacctgtagcactgcttcgacttcggcatcacgatctccatacctgatggaatgaacacgtccagtcatggtgacaggcccagagtggagattgtccacctgtgccccggcggttaccgtcaccgtggcacccacgccagccttggttataacgtcaattgcttggggtcctggaatactagcatagatcacagatgagcttgattctttagaaaactctgatcgcttgagcagttgatccaagccgaaggtcacgtcgcctgatccaccagcggtaggattatctcctgaatcagagatgaagaaaggcctcttcgaggatgcgagcgcgttgtcaatgcactcggagaaagacccggtcggcgcaacgaaacggaagtctttatggacttgccagaacaaagacgcaagtctcttcgctcccctagcaacagcaaccttattccatccagtgaccattactacagcgtgatttcgtggctcatctgcccacgcatagccaacccatatggctgcatcgaggacatcatccatcgcttcgatctcgggaatgagcgaatacaggcttttagctggttcgttgcgagtcgaagtctgctctcctggcagcaagataggaattgggacccatgctttcaggggtctattccttctcccagtgtcggtttgcgcagtcaaaacatggaccagattgcgacaagcccgctctttgctctccaattcatcctcatgaggtgccatacgataacaagtgatcagatcagtctggtgggccagctctcgggacacattcccatgcaaatccatagatgccgagaccaaaacatctggaccaataacagtccgaatccgccgaagaagctctccttccacatcttctatatcctcaacacacattgcgccatgaatatcgtaccataatccgtcaatggggtttgaagcgacaattccagccaaccgctccagtatttccctggaaagttgttcgaaatcagctcgaaccacgattccacctggaagggcatggcctatgagtgcccccttccaatctgcggcgtctgctagatgagtgccatgatgcagaaatgcgtattcctcgatcacctccgggccacggcgcgggtgaaacgccccaccgagtgttcgagcgggggaaaagctagaggtctcacaagcaaggcctgcgattgcgataactggtcgttgagacatgattcgcggagggtgaagaaattgtgccaattgtacgaagtgtaagaaacgtaaggatgggaagatgaagtaatgttacaggatccaagacaatcgcgtcagactgcttttccccgctctggtgacaagaccatgaggtgaggaaagagcgacattgctgcgcctgtctgatattcatatctaaagagacaagggatcaaaattcaaaatataaaagacctagccactgagtaaatagtacaaaggtagtgggcacggttgtaacatctccaatcaggtgacgcgcgggcagtcgcacaaaagcgcgtcttcccacttgtttccgtcctctccataccaaccaatctaagtcatgagtcaagctaatattacacaaagaccaatcctagagattgcgtgcttcaatcaagaatcggccgcagttgctgcgagagcaggagcggaccgcatcgagtgagtatcttattcatgttcaagctcccggcaacatgcatcctgaatttgttttccttgttgctagatatccctacgttctatcactaattgcagccaaggttatgcaaggactaccacctcggtgggctatcgcccgacacagacaccctcgaacttttgaaatcacagctcgcgataccgatctacacgatggtaagaccacacgcggaaggcttctgttacgacgaatttgactttgaggtgatgaaacgaacgctcaattctctgaagtcctacggggctgacggtttcgtcttcggtattctgaatcgatccccacaaaagccctttgatccgaaaatgtcgtggatcgatgtatcccgtaacaggcagcttgtcgaactagcggacgggcggccctgtacctttcatcgcgcctttgatctcattcccgaatcccactgggagagtgcattggccgacatcatggaatgtgggttcgcttcgattttaaccaacggcggtgcttcggggacaaaagcaaccgactgtgtcgataagctgcaagctctggtccgttatcaaacgcaaccacaggggaaaataaaacttcgaagcaatatagttccagaaatcattgttggcggtggtgtgagggcatcgaatataggcttgctccacagcgtcactggtgcctcggtcttccactccgctgctcttctgggatcggaagaggtaacctgcgcaaatgaggtgtttaagatgaaagataagatatcacgggtatcggaggcagatgaaatggcgcaataatacttccacgtattttgtctgctttatataccgaacataaacccgagcaccatttggtcagaagtgtatgccattttcccaaacgtcttgcagcatttttggcctttgatttgtataattaacatgatgaggagaaaaggaatgcagaggcagcggtagaaatccaagcatcgagggcaagttggttacaacatccatcttatttgtcttcagattttcgatctcggatatgctgtttaccattgtaatcggttatccggctgttccaatgcctccttttcaggtcctgggtgaaatttggctggggttattgcctcaagcaacttgtttccgaatagtccaaaagccgaagcaatcccaccaaatcggaagatctcgctttccatttgactcagcttgaatccgaacgtcttgtcggcgactttgatgattcgtgaactcaaatcgatggagattgacactccatcattcacaagctgaaagaaggattcatcttccattgtgatacccaggagcccgagacttggcatattgcgttgaaagatgaacgaaaacgacttggctatgacacattgaacaccgcaccctagaagaaacccgtggtcagaaaacagacattcgtttcaatggcatcgaacctaacttacctaacagtgccatcactgcttgttcgcgggatgatccgcaaccaaagcccttaccaccaacaacaatgttgaaaccctgctgggctcgttcgcggaatgttggatatctatacaccaggcagcacatgccagcgtccatgttactttttatgccaatcagaaactcagcaggagccaactttaaaaccatcagctctggcatttgacgaatctaatgaaagaataaacactcactgcatccgtgtcgatgaagtctcccagtttctgcactttgccttgaagacttttgacttgtctttctccgtctttatctagccgcatgttctctatgtgcttctgtgtctgggtcgtggcactaggataaccacgagaaccacatggctcaacatatgccaggtcgctcttcgagttggttgtattcaagtgtatacgtgttgttctgagccgctcccattgacttaaatcgatcgacgcaatcagatcactagggtcaactagcttcatttcaaaggaggatgctgcgacagtggctgcagaggcgagatgaccaattgaacctaaatcggatgatctcaattgaccgtgccatgttattgaagagtgttcattacctttacccatccggttttcgaagttgcgattctgcgaggaaatccatacctctcctggcgcggcctggtcggctgacatcccgacacaatagctgcatccagggatgccaacctcaaatcctgcgtctgcgtatatatcacataaccccagttcacgtaagcgatacaatattggcattgaaccgggaacgaccttcctcttcccctttgcggtaggctttaatccccttttcattgcttgttcgattaccagagcaccgaggatgagatcttcctccgtggtagtgcaggcaccgataaaacatccattcagctccattccctcttcttccgtaactggaaccacgtcatccggctttggataacgtgcgatgaaagactccacttttgaaaggtcaatctcatgaactgcggcgtactccgcatcggtatcgggcctgaaatatgccgtgtggcatttatgacgcgtaagttttcgtctactaatgaaatcgtgggtaatttcatccggcacaaataaaccagtgatcccgccaagttcctgtcattcatgttagtgaatttgacccaactgatttatggtttgtgacataactgtggtcatgtttgaaactgcgaagcgggtgtcaagggacaaatgcctgagtgctggacctgtgaactccacaattctgtcggatgctgtagtattccgtttgagcacttggaggatgtataaaatgatatctttgcccccaatccctggcttcggttctccaaccaggcgtatattgatggtttcagggactttgaaccatgtttccccagttactaatggaaaggtgacatccgcagcgccgagtccaaccgcgagacagcctactgccccggaggaacatgtgtgtgagtctgagccaacgaccagcattccgggttgcgcgcgctctcggtagaattcagtgtggagaatagtgtacttcataggcgtgattcagcgattggaaaccccccgacgaaaagagaactgacattgatgccttggtattccgtcattttgaaggttttcttcgctctctcgcttacaccgatcagcgcctgcacttgaggtaattcattaatccggggatcaacaatatggtccccagaaagccagaagcgatcgtttcggaataccccgggttttcctagcagattataggtcgtttccattcccttgagattcacaatcagcccgcagctcacagtggctctagaagcgaacctactgcccaagacacctcagaggcaagtatccaatcaacgtggacacgaattatatctcctggagccacccatccgatgtgatttaaatcatgcatcgcaaatattttctcactcacagtcatccctcggcgaccttcgggcctgtgtgttagaaggcaaggcattgatttttctcggtcggctgaattcagggattcgagccacgcatccacaagaaagaacatttccgattgttgttgtattgtcagagaatcaggctggtttattcctaggcccccaagcatggctggctggtagcagatgccaaggacatcggtcaggacatcgacctcccgttgcttcgtatgatcggtgcggagaatcgttgagatatactccaggttttgcaacgcattgtgtgtggaatgggatgtctctaaaagccccattgtcctactcagaacaggcggctcagaggggatcaagcatactgaccatttacatgtatatgtattccgcgagtctgttctaaaatatgaaccaattgattgagacttgattggttgctttcaggcatcgttcatgatagatactttccaaggtttggtctggtggtcttgaaggggctaaccggtcttaatattcatctagcaaggttatacagaggttgtacagtagaacaatatagtgatgcacggattactcggtcttacaccgctcgaaagcgggtactgcaacaccgaagggatttgacttgcagatgccaccgagtagaacatacgggcgcatgcatgccaatctccaatgctacctttatggcagggtccaagatttgccgcgtaatcctctacgggagcatagcacaactcgtctcgtgatctaaccaatatagaccgcggggtcctcaacagaaggtgcctattgaaccagttgagtagtcaagtctgacattcataaatagggtaacgggcaaggtgaggtatttaatttggactcgacctatcattatacgagtccgaaagtatccccaatcctcccaatctatacgaagtactctccgtacatacagcacaaagatatccttgtatgtacatatttacatcatgcatcgtgccgttgaccaatgatacatgagtacacactagtacccgttgacggaagtacatgattcatataaccagccaatagcagatcccgcggggagctgatggttcttccgtgtggggaaccataacgccaaggtttcaagtcccatggttgacgaagttaggcaagccacgagagataatttgccgtatccgcggccaatcagcaatctccttgtgggctccacgggtttttaatatgatcctgaacccgtggacctcttcagggttccaacactttattattctcttctctctctttattctacgtccacatacaactgttgtatattgtcctcctcacgccttttgcttatcaaaacagaacattatagagagagagaagcaatatggaggccatcgctgtggatccagacttgtacgcccctgagagttcttatagccccgatgactggcagtcgtgagtttgcatgtgattatccatcttgtacttcagattttcctcacgcgtcattagggaaactacctcgattgggtcgtcaatctatcgtggtttgatggataatgggagacggtaagagcttcacagattggatcacatgatgatctcacataacctcacactcctatagatatcaatcgctctccaacaaagaatactggtaggtagttggaattactcacaataagaataaactcatctcaaatgtagtattccatccgatgagcaacagtttgagacctacgaggcagggtacgtattgcaatcccagtccagagccggcctctaactatcgcggcagacacctcgtggatctcattatggactcagatcgagccaatccactgtttcggtcacccatcgggaccgaccgagaacgcccgctacaggttctcgatattggaaccggaaagggaacttgggccatgtacgtctgtagaccgttccgacctcggtgaaaatgtttagggcttatcattcctagcgatgtcgctgatatgttcccaaatgccactgtccgaggggtcgaccttttcccacctccggttacctggatgccacccaattgcgtcatcgaggtcgacgatgtgctgcaagagtggacatggcgcgaacaatttgatctgatccatatgcgcaatatgatcggatcgtttgactctgctgagtgggacattgtttaccagcactgctttgagtaggttatcaatacaacaaagtgtccggcccaatctgactgcataacagcaaaatggcccctggcgggtggatcgagcagatcgaggccggcccttttatcacaagtgacgatgggagtctcccagccgacagtgccttgtcctcgtggggtccaattatacaaaagtgcggtgatcgcgctggtcgctcttgcgatatcgtccttaccatgtcggatagcatcaagaacgcaggttttgtggatgtgcatgaaaaaatctacaaatggccaattgggccatggcccagagaccaaaagttcaaggaggcaggcgtggtcaattgccaacactggatgtctggtatggaaggatggtgtatgtggctgctaacgaaatttggtgatcccgagccgtggactaaggagcaagttcatgtatactgtgccaagatacgcagtgaactcaaggacccacactaccatgcgtatcacaaagcgtaagttctgatctgtcatcgctcgcgtcgctcacaggccaaactgaccaccagtataggagaagagtgtgggctcgcaagccgatgcctggtgaagtcccgcctaggtcatcaaagtccagctccagttccgctagggcaaaaccatgaacccatccgaggattcacctgtcggataatgtatcaggagtggacgactcgccttcctcggtcttctctggtcctctcgaggatcggtttgttgcttcgtttgtatataaatgatgcccgtcacgagcgagctatgttcctttcgtcataatactcaccgttcaccctctgctacctgctaatttagacctatacaagtggtggttgttaggacaaccaagacacgtggggggaagatgtagaagtccatatacataagctgattaagcattgtgattgcggagcgaagcgaagcaattaaattgtagtcacataagcactgatcatcaatgagctctctgatttgctcacagagtacgaccagagtggaaggttgaacgcagctacatcaataaaatgcagggaattaatgaacacgctagttacttatctccttgtttaagaaactgaacaaatcaatcagtatattcatcgcgtggaatgcgttgttgaaatatttcttcaacactcaaataatatttgcattttatcgttcatcaaaatcatgcctttctccagcaagtgtccttacatcataatcttcacccagttgatcacctcatctttttgctgcctgcaattattgcccgtgttttagatcccgcctattatctcgtgagtgggactccacgtctactcgagtaaacggccatgtccgtgtcagatgttcgattctcgtgcgggttacttcagccggatggctctatggaagccgattggctcgcagcacagctcatcttccctggtagaatttcctacttctaaaagtggctgtatatactccgtagctatctcatgcattaagacctagattggcagaacagcccccagcccctgtttatcagcacaccgctcttcctctcgtcattcttgtgctttatgaagttggttttcttctcctaacagctgttctactgaatctactctattttcaaacatttcgaacgcaaaaccacggctaccagcgatatggattacgaggttgaacaagaaatcgtcgcattcttcgacaagactacgacgactcactcagcctgtgataactaagcgagtgagcatcttggtggaaatgtcactccagtcgacgtgcaaggcgtgtgtagctacaccgtctatgctggccctaacgccggattcgtcgtgcagtatcgtctgaagtccctagcactgaacatggacattatgaatctcgtcaaagccatttacggtaccttgacaccccagatctccttcaagggacagattggggataatcatgagattaaagaaccgctttacatatacgttatgaaccgaatgctaggcatctctcaactggattttatcctagcccataacggtgatgtacctaaaaactcgctcgagttctcccgctagcgccaaaatcttgtggccgacaacgcaaagtgattcatttctacgtgatatatacagaattgctgatcatatgtcttactatgtagattctttgctctattttgaaaaggtcctcaggatgttgatcaaacgtaccgcgagagcctgtgccatcagttcaaacgagacctgaatttgttacttgcttctctccccattcgattccatccattgatcaagaagtctcttgactcgttgccggccatcttttcacttcctttggtgctactacacaatgattttggttccttcaacatgctggtgaacgaaaattcttgcaatctgctcggcatgattgattgggccgaagctgagattgctccattcggcataaatctctacgctcatgatcgtttgataagatccatttgaaacatggctggtccaggtatgatgattatcgccttttggatgagatattctggagcacgtttagtcaagggaccggagtggacaatgaaacaatcaaaaccatcaaagctgcaaggattgctggagtactgttgtggcttggcttcacaagtcgtcttccgaatgagccgaagccagtaccgattcctgatgatgatgaaagtggagcatatggcatgcgtgatttagagcttttgattaatccagctacgaggttcacggacttggtatgataagatgaacgtgtgtctagaatggcggccaagcacaccaagcatgtgtaccagtacggcagccgaaatgggccaaacggaatgcttagtaatacatattatatcatttttaccgctggagttccagcgtttcgcgcaccggggagtcgagtaacgttatgttggtgttcagttcgcatgcgcctccaaggccctcccagcagccaaacatggagtacgtcagtgcgcgctggagaagaggatgcgcggggtgggatcggcatgacagaaaatgtacggcccaatccaaacccttcaaattcaggccgggctgtcacgaagtccgtgagagggatggtgaagtattcgagatgaggagcaacggtataagccatcttgatttgagtagtgctgatgttgtcttaccttccccgccaggcaacccctgagctgttttttttttttttggaaaaaagtgaaaagaggagaataccaactacaaaatcatagaataagatgtaatcttgtgatattgccatttctacacttccctgtaagatttcaatctatgtcgtatgagtcattgtatttcatgatgacaactatagatgtatatatatgttatatacattcaaatcctgaatctattttgattttgatatttttctctcggtagtcccatggcctagaatattaacctagaggtatcacaaaagggtcgctgaagggaatagtttaatagtctgatgtgggcaatatgaatcacagaattgggtgagaatcaaatgtctcagttgaagacaacagtcttatggccgttcaagatcacgcgacgctctgtcacgtacttgacagcagtggcgagtacgttgctctccacgttgctgccggcatgggtcagctccttggggctcatgccgtggttgacccgaacgacattctgttcaatgatcgggccttcatccagatcactagtgacgaaatgagcagtggcaccaatgatcttcacaccgcggtcgtaggcctggtggtagggcttagcacccttgaaagagggtaggaagctgtggtggatgttgataatgcgaccggacatggcggaacatagggttggggacaacacctgcatataccgagccaacacaatcaaatcaacgttgtgttggctcaccaattgcagaatctgggcctcctggtgcgacttggtctccgcggtgacgggaaggtggtggaatgggatgttataggtggccgcgagggtagcaaagtccgggtggttggaaacaattaaaggcacctcaatgctcagctggccggtggattggcggaagagcaggtcgttgaggcagtggccgatctttgagaccatgatcagcacgcggggctttttcgcagtggggttgatctcgaagttgagggagaacgactgcgcagtgggctcgaacgcagtgcgcaatttctcgagttcggggacttcatctcctccacttgcaagcgcaaattgtgtgcgcataaagaagcgctcagaggcaggatcaccgaattgcgacgaatcgataatgttgaggttgttctggacgagaaatgcagtgaccgcgtggacaataccaggacggtcagggccggacagggtcaaaatgaagctaaaagccataataaatgagagaacggtgttgaatccgctgatgttccgttgaatagttaagaggatggagaagaattgtcctggtttcttttcttttttctcttttttttttgtgaatcccactcccaatgttgccggtttcggcgatgactcatctgctgccattgcccgccttcggcttcttcttttgtttactttgcgcccttttgagcttcaatcatcactttgatctatgtgatctcctgtccttgatctacagtatcatttgggctcaggatcgacaacgaaaacatctcagctcgatcattttactcccccatgcgtcggattccatctttctagccaccttttctctcgcgcgacgcaaagccactcggcaacaacattatgcatcgatctcacctacccaggtgtcatgagactagaactgcgttgctgacaggcctgtgctcggcattggttccttgacccccgtgattaaaccaagttatcttcacgacgctaatgcatcccattgcacttccacgagccagcgtgcgcagccaacacaaattaccgagaactggggaaaaggctaccccgtatagaccctagatctgggctacggtagttactattttgtcacggatttaagatttttgtttaatctgggtgtgctaacatctccaagtcgggcgtcctacccagcatggcgttgtctgcctaattcggaggctagccatttagccgccaatgcgtttccatacgatgtgactgtgttgttgggggctatttggcgagccgaataaaatcgtcccttaccaagcgatgggaatgttcacagccatctcattcgcaccaagaagccgcctccacaaaatgataccaactacatccgaagccagtcgcggggggctccctccgtgtccccggagtgtttgtcgtacttctccattgggaagcacgatgaattgtgacccttgctagttcctattagaatataaacggactatgtatctatctgattcttaatttcctcatcaattcacccggcaatcaagacctcatcatggcttccactctctccaatttttacaaagatgccctgctgttggtcgccttgctcagaactgcacaggcacaacaggtgggcacaaacaccgctgaggttcacccatccttgacttggcaaaaatgcaccactggaggcagctgcacttcccaaagtggcaaggttgtcgtcgacgccaactggcgctgggttcacaacactgccggcttcaccaattgctatactggcaacgagtgggatacaactatctgcccggacgatattacttgtgccactaactgcgccctagaaggtgccgactactcgggcacttatggcgttaccaccagtggcagctctttgcggctgaacttcgtcacccaggcatctcagaagaacattggctcacgtctctacctgatggcagatgatagcaagtatgaaatgttccaactgctcaatcaagagttcaccttcaatgtcgatgtctcgaatcttccctgcggcttgaacggtgctctctacttcgtatccatggacgcagatggtggcatggcacgataccctgccaacaaagccggtgctaagtacggcactggttactgtgattcccaatgcccgcgcgaccttaagttcatcaacggccaggccaacgtggaagggtgggagccttcttccaacgacgtcaacgcaggtactggcaactatggttcttgctgtgctgagatggatatttgggaggccaactcgatctccactgcagtcacacctcatccctgcgatgacccaacccagactaggtgcagtggagatgcttgtggtggtacatacagcaatgaccgctatagtggtacttgtgaccctgatggatgtgatttcaacccatatcgcatgggcaaccagtctttctatggcccgagcaagatcgttgataccaagtcccctttcacagtggtgactcagtttatcaccaacgacggtacatccactggcacgctctctgaaatcaagcgcttctatgtacagaatggcaaggttatcccccagtctgtatctaccatcagcgctgttactggcaactctatctccgactcgttctgctctgctcagaaagccgctttcggggacagggacgtatttactcaacatggtggcatggtgggcatgggggctggccttgctgatggcatggttctggtgatgagtctctgggatgaccacgcggccaacatgctgtggctcgacagcacttacccaaccgcctcttcttcgactactccaggtgctgctcgtggtagctgtgacatttattctggccagcctatcgatgttgaagctaacaatgcgggtgcctacgttatctattcaaacatcaaggtcggtcctctcggttcgactttcagctcgaccaactcaagtgggacaaccaccacagtcaccaccagcagcaccaccaccaaggcaaccagcaccaccaccactactacatcaagcaccaccggcgctcctcaatatgcgcagtgcggtggaattaactggaccggtgcaaccacctgtgccagcccgtacacctgccagaagcagagtgattactactcgcaatgcctgtagatattaggcaaccgctagtgtgtagtggtggagactcggaaaatggtgaagataagaaacgattggatcagtttctcacgctctttgttgaattgatggttttggctttgcttgaattcgagagattgattttgcgttcttttaaattgaaatccgtatttgttttctattctccgatctttctccgtatataatatgcaggagctcttaggtataaccatcatatccccgttcattgctttgctgctcgtctttcgacacgcagggcttcaaacaaactttagtcaccaaattgagcatcggcgaaggattattaggaatgaggatgatttattcggctcccttgtgactccagtcaaagtcaacagggatttgtagagcctatttgatccgacgaatgcaatacgtgtacaaaatttggtttatgcattcaatcagcattgcgcactcgagaagcgcctaacgtacaagcgaaatccaaccctgcttaactagtcggagcagcctccggtttccgtatggcttcttcaagatgaacaaggtaacgccacatgcatcagccgggtctgggtatgcggggtattccttgcaggggttatcggcttacattgttcagaaaccagtgctgcagttgcaagcccgtgagatttgtcggataaatgaccggaaacttgggcagtctgacaatcgtcaggctcttggctataggtactgtactgtttgtcggcaatatactcccatatccatggagtactgtaaattgattccattttgctttccagcttttccggtgcctctcgtgtctaagctccttaccccgtcgcctcatatccgaaatgccagccacggagagattgatgccgtgccgaatctggactacatttctctcgtatattagcgattcattcttattctagctcgggtggcggtccgcaaaaagaaatcccaaattgaggcctcgaagacgatccccgcagacctttctcttaagctaaagtgtttccttatacgtaagaacgaagcttcgcagtctaagtcctaggtaggcagggagcttgctccttgtcgttattgttcattgtaaacttgatataaatcctattataactcctgatacattcacactgcgtagcagcctcgacaattccatcacctagtcaagatgcggtttacctctttatttaccataaccggcatcacaggcctgggactagcagtaccagatgcggtggaattaactggaccggtccaaccacctgtgccagtccgtacagctgccaaaagcagagtgaaaactactcgcagtgcctataggtgaagcagtagagcaacaagacatcgggatcagcggtagcttgacgagggttctacattgttgataaaatcaaatgttcatacatacttgtagatctggatggctctggtaactcaatgttgtacagatcgtttgttaggagtctcttcgtgttttgttctacacagcaacattccacttcatctctctctattgcagagtagcaaccagctcatccacggttttcatctcgcgaccgttgttctcgccgacgtccagtgcaaccaaaaaccgactcacacagttataaccggcgatgccagtggtgagctccacgatctcgcggtcatcgtacccgaccgtcttcaattcagcaaaaacagcatcttcaactttaatggtgcgagtcatttggtcggtatagcgtaaaacggcgcgctgttgtggggtgagtgcgctagtctcaagctcggaaatatctccctcggcggtacaaggcagtgtgagagcagcctgcaattgactgggcttgataccacctttgagagccagtggagcgtgggcattccattcgtaaacagcgttattgagtacagcgacacggcagactgccaactccatgacaccagagtcaaccaaagtgcgcgaccgaatagctccgatgaagctgttccagccatcggcgacaggtgggctatggaggagggataggtcaagcgggattaaaggacgggggtttctgcgctccgcgatgcgggcatagatgtcggcggtgtcagggtgcgcatcgacaggcggggtggaaggggcgtaaggcagacgcatggtgcgtgtatgattgattccgagtgatatggggttatgtttgaagatggtgtatctacgctgaaacacgtacattggagtccgttttcaaagtattatgtttttttcaaacctcaacagttcaaacgcgggggcgggaaatgtcttacccgcccacgtgggggagtgtttctccggcatcatataggtcttcgtaggcatcacttcccgattagaaatgtctactccgtactcttcaggcttgtatcgaaatgagaagtcggtttattaatagtaatagatcaggctgagttcatattctcgccgcaaacgagctccaagtcactatgaacagtctcaagagcaatttgcaaagttagtatgttgtacaacagatatacttggacgctaccccggattgcggagggcactcggagctttgaaaacgtggtgggcttagggcttaggtatttcaaaaaattatactcatactcacctggaaccctcaaattatcagagaacaaaataatggcaaacttgatcccaacaccggcactagagtaaaaacatactcccgcagggtgccgcccctcgatgccgatatcccccccgcatgcggataacattgaactttcattatattgaagttttcgccttatacatgatccgttctgttttctctcggccatctgcaatctctcggtcattttctcactcctcaatcgccaatatgaagcatcatttgatggtcggtacctggactgcccccggacgtatctataccgtgcaattcgacgacgatgcccttacgctagagttggtcaaaaataccgagattccagaagccgagcccatctcatggatgactttttctcacgataagaaggcgatatatggcgcggctatgaagaagtggaacagtttcgctgtcaacagcccaacagagatcattcaccaagtgtcgcacccggtggctggtcaccgtatgtctacggagtcaatggaatacatgtccaatttaccctcgctaactctttcttttgtttcgcgctagctctggctcccagcagcgagaccaacactcgtgctatcttcgtgcttgccgcccacaagcctccctacaatgtttacggcaaccctttctacaactacgccggttacggtaacgtgttttctgtgaagcccgacggaagtctggatagcaatatccagaactacgaatatgtccccaacactggtatccacggcatggtgttcgaccccacggagacgtacttgtactccgccgatctcacggcgaataagatttggacgcacatcaaggaccccaagacgggcgaattgacactggtggattgcctcgaggctcctgatgccggcgaccacccccgctgggtcgagatgcacccgagcggcaagtacctgtacgcgctgatggaggcgggcaatcggctggcagtctacgtgatcgatgagcgcacccacaagccagtattcactcacatcacgtatcccttactgccttccggtgagtttcgacaaatgcgaccgatgttgatggtaacaactaactcattaggcctccccccgcgtaacaagtatcgtggagatgtcactttttgcaccaagggtggagagtaccttttcgcgactactcggtcaaaccatttcgatgtgactggctacatcaccgcgttcaagctcggctcgcatggcgagatcgagcgccagctctttatcaacccgacctcgaccagtggtggccactccaacgccgtcagcccctgtgacttcagtgacgagtggcttgcgctgtgcgatgaccagcttgggtttgttgagatgtaccgctggcgtgatgagaagttggcacgcgtcgcgcgggtggatatccccgaacaaggatttggtatgaatgccatctggtatgattgaacgaagaaattagaataaatgaagatcaacatgtagagcaaaagattatgtacagtacacaaaatagattggtgtaaaaaaagacaaaaagccgaaagggaaatatcgtcggcagtcaagttcgggttctgctttcacccggatgagggcgcaattcgagtgccgatgttctttatgttctggggatcctcttttttcgcattttcgcatctttggctcctttctctgtattgtctattctggatttcctttagctcttcatcatgcctactcccggtcttctctacgtgacaatgcagcccaagggctcgctaccggacacccagttccacgactggtataacactgaacatgggcctctgcgtctgcgattgccctttgtcactaatggctttcgtttccgtgccacagatggagaacagcctgaatatgtggctttgtacgatattaccgacatggacgagttgacccgcaagacctacttggatctgagaaccgatatgatcaagactgagcgggagaagaagactatggcccaaattgatgtcggccgtttactgtatgatctagtggatgagcgcagcaacccgaacttccgcccgctagaagatcaagccgatacggatgccgagacccggggtagcgtcctcgtcgccgtccgagttgccactcaccccgaccccgccaaagaagctgacctggataaatggtaccgcgaggaacattttgagatgctctctcgtgtgcctggatggcgccggagtcgccgttttgtcactgcggcgatcgattccgccgccccgcgcgaatcgctgactctccacgagtatgcccccgtcaatggtcttggaggtgaggcccacaaggccgccatgaataccccatggggatcgcgtctcatgagcgaggtggtcacatctaagaagcgtcgcgtatatgagtggtactacaccttcggccctgctccccgtgagctcacttcgctagctgccccagatgtcgttggtccctggagctccaatgatggccgtactcgcacatttccctcgaccacccgcccagctgtcgagtcgttcatcactacttctgatggggttgagatcccctacaggctggagggtagcagagacccctacgcgcctgtcgtcgttctgagcaactccatcctagtcaactggaacatatgggatcgtttccttgacgccttctttgctcagcaacagaatcagcgttaccgtgtcgtgcgctatttgactagaggccgacgctcgcagagtggtgagcagcctgtcaatatcgatttactggcctctgatctggctacgttgctggaggctttgcgtgtgcctcccaaggccgctcgtttgattggtgtcagcctgggtggtgtgaccgtattgaacactgctctccttcacccggagcgcgttggagctttcatcgcatgcgacaccaactcctccgcacccgaatccaaccgtaaggcatggggtgaccgcgtggctatctgcgagaaggaaggctctaccgatccagacaccaatgagcccattgttggcgaagagttagccgaggtaaccacccgtcgctggttcgtgccggaatcataccaggcccagcccgaggtccttgcgcctgtcaaggaggctgtgcgcaccaacagcttgaagggatttgcccatagcgtgcaggccctctgtgcctacgatatccgtgagcgcatggctgctgccactgtgccaggcctgttcatcgctggagccaatgacggtgtcctacctcagacaatgcagaagatggcagcagatctacatggtggcgccgaactgaagctcatcgaccgtgccggccatctacccatggtagagcagcctgtggcattcgagaaagttgtgactgagttcctcgggaaaattgatggttgattgcatttctataggtcatgtgtagatagattttgttcgggcgtatgcaaggaaatgactgatgaatatgttgactgaaccttcgccagtgagacatgactgtatcttcccttcaagtgcgtgcttgtatagagtattgttcgactgatcaaatcataacttcggatccaccaatgtgtatgtacgggcatgtgcgtcagatgatctccgggcttccgttgtatggtaaaagcctgaatatattgtccagaggatgaggatgcttatgcgggagggaagggtgaccggaggctgggtgtctttcgaagtacctcaatgaatattcagtagaccgaggtccaaatgtcaagaaaaatctcaactatgagctgtatcacagagcattgttgagcacaatcgtaaagaggagaagacgaaatgatgagaagaaaaagttgcagagctgaacagttcggcagacgaaggcggccaagggtgaaattcagcttgcggggggaaacgtcacacttctccttgacgcgcacttttctacacgttcttcttctccgctctctttcactgtttcttcaattattcctttctatcatgcctgagagcaagattcctcaaccgggtcctgccaaactgaagcgcaatgcgggccctgacgagtggctggaggcagcgaaggattgcaagtatctatcggagccacatatgaagcaactgtgtgagattgtcaaagaatacatgatggagggcaagtgctattcaacctgaactcagttctattattctaacattgttcgcagaatcaaatatccaaccagtatcgacacctgtcacagtctgtggtgacattcacggccaattttacgatctcctggaactctttcgagtttctggaggcatgcctgatggtacagaactcgatccgccgaagacatccccctccgtgattacctcggccgatatcgaacctccctcaagcatctcagatcctaaaattcgcaagaagcttcgcggctccaacatgaactccaacgacgaggaagattcgagttcacggagccgatcggccagcggtacatctgcagatctccagcttaaccgcaactttgtatttctaggcgactacgtggaccgtggatacttcagtcttgagacattaacgctcttactctgtctcaaagcgaagtaggtcgcacatggcacctcctggcgggtacgtgttcactgctgactcaatatcctagataccccgatcgagtcacactggttcgtggtaatcacgagtcgcgccaaattactcaggtatacggtttctacgaagaatgcttccaaaaatacggcagtgcttcagtatggaaggcatgctgccaggttttcgatttcatgacattgggggctattattgatggcaaggtgttgtgtgttcacggtggcctgagccctgaaattcgcacattggatcaagtccgcgtggtagcccgtgcacaggagatccctcacgaaggtgccttctgtgatctcgtgtggtctgatccagacgatgtggagacgtgggctgtcagtcctcggggagcaggtgagaatcatctaggtctttcttgaacacgcagctaacaattttaggatggttattcggagacagagtggccgatgagttctgccatgtcaatgatctctcgctgatcgcacgcgctcatcagctagtgaacgagggctataaataccactttaacaaccaaaatgttgtcaccgtgtggagtgcgccgaattactgctaccgatgcggaaacctggcctcggtctgtgaaatcggagaggatctcaaacccaccttcaagctgtttagtgcagtcagcgatgaccagcggcatgttccagtctcgcggccagggcgcagcgagtactttttgtaagatgcgatgcgagttctgcaccggcgctggcgttcggtttgatatttgggcggcaggataagcattatataatgatttagaccagacttaatgatgcatacgccttgtgtttatgagaaaccaaaagggatcatctcaagctctagagatctgaatagagaaccggcgttccgaaaacttgatatcccttgaagagcaaccccgatcaacctctccccgcgctccatactatgggaagcaacgacatggggtaaattaaaacaagggttcgcaatatcaacacggcagtcaccaggggattgactgccgaggcttctcgtccagagcgattgtcccgcaattgcctgccggggcgaatcccgagatccgggggatctctcccaggtgcaccataaaagatcctagatatatgcactcgctaagtgcatttgatctcaatctgcgcgcacttatacaatggagaaagtcgatgttctcatttgcggcagcgggtctgccggtctttgcgctgccacttggctcgccaagtatggggtgcggtgcaaggtactagaacggcgggatggtcccatgaagatgggccaagctgacggggtacaatgccgcaccgtggaaatttttgaaagcttcggaattggggaggagcttcttcgtgaggcttaccacgttctagaggtcaacttctgggccgacaatggcacaggcgccatcgagcggacaggctggacggcggatacccagccgggtctatcacaccaacctcacgttattttgaatcaggcacgtatcaacgggctcctcatagacctaatgcagaaatataatgatcaacaaatcgactatggctataatgtgaccaatgtcaaagttgatagcaccttcgctgaggatcatgatgcctatcctgtcaaagtcactgcggaaaaggatggaaagacagaaatctttgcagccaaatatgcattggtaggtgctcattatctttggggtctagacgttttctgacccgaccatcaggcttgtgatggggcacacagcattgtccgcaaagccctcgggtataaaatgatcggagacagcagcgacgctgtctggggtgtcatggacatggtgccccgaacggatttcccggacattcgcaagaagtctactattcgctcgaaatcagggaatgtcttgattattccccgtgaaggcgatagcgataacctgacaaggttctatattgaacttgctccaggaaccaacccgaaagaggtgactctaaataatttgcaggcccaagcacagagcatcttccacccttacaaggtagaatttgtggaaacgatttggtggtctgcatatgccatcggccagcgtcatgccgatttctttcacaaggatcaccgggtctttctcgctggtgatgcttgccacacccactctccgaaagccggccaaggtatgaatgtcagcttacaggatggctacaatattggctggaagctcggggaggttttgactggtctagctagtccctcgcttctagagacttacgttatagaacgtcaaaaggtggccgttgatctgattaactttgaccgttacttttccaatttgttttcttctggggcctcaacatctcctgccgagttccaggaaggcttcatcaagtctggcaaatatacagcaggtttaacagccaagtatgaggtgtcgtccattacatcttcattggaatcgaccaacctcgcttctaacgtggccgttggtatgcggatgcccagcgcgcaggtcgtgcgattctgtgactccaaacctctacatctcatgaaatctctcaagtcagatggccggtggcgtatcatggctttcgtgggtgacctgactgtaccagaaaaccacacaaagctcaaccaggtatgttggtcacttccgaaatgtacttaagccttatctaacgtatcgtatagctgggagaatacctgaccgtggcggatgggcccatccagacattcactcctgaggatcaagacattgacagcctgatcgagactattttgatcgggtatggaaatcgtcatggtattgagttggagcaaatcccggaatgcttttatccagtctctgggaaataccaaacaagaggtgcatattctctaatatcttatggtcccatcattcctaacccagagtatttagatctacacaagatttattacgacgacgagagttacaacaatgggcacggccatgcatacgagtatctcggcattgatgcggcacagggtgctcttatcattgttcggccggaccaatgtaagcaaatccgtaatcgtgagataactagatacaactgacgctttcaaatcgatagatgtttctgctattattggtctaagcgattattctgaaatcggcaacttctttgctgggtttctccaacgtcaaacgtacgttgcgaaggatacgaaggacacacctaaataacatgtacagtagggccatgaattccagctgtcaggcgtccagcccaattgcagacatcatggagaaacatggttaggttgaaataaatgggaatttgagtggagtttgcaaactttgaatatcattaatgtgctcaattttcctgcggagggtattgtgattcaaaggtcggtctatatcgaagctgcttgaaatccgtacaaattgcatgtgtcaggctatccttaccaatggggcagactatctagtcctatttgtgtagttgccctcggtctccgacacctatcatccgatttttatcctgatctcacgccgagctcacgttacattgagagtcactcatgtcttccaattcaatctagacttattccctccgggcttaacaaatcttcggagtaaatgttattataaacgtcgatattaaaacctttttatatcaaatttcccttttcgttttggtactcggaacagtttcctaaacactaagccggactttcactatggaggtttctgttgtcatgtttgctgctattctactggccacgtctatcatcgcatctcctctctcctctcggctacagacagacggtgagatactgcgatcttcccaagctctgcgccgcacgatccagcctcataaaccaggcaccttagaagtgctggatctgaaccaaacgtcccacgagacttacagctccaactgggccggcgctatcctcattggtaccagatacactgcggtatccggagagatcacagttcctgtcccccaacttccaaatggtgctgatccttatacaaattactgcgcctctgcatggattatcatcgacggcgatacttgcagaacagccattctaaaagctggaatcgatttctgtatccaaggaggcctctgttcatatagcgcgtggtacgaatggtatccagactacgcccatgactttagcaacatccaaatttcggctgaaaatgtgatcaaaatgacagtcgatgcaacttcgaagagttccggctttgcgactatcgaaaatctatccacaggcgtatctgtgacgcatatattccccaatagccttggcggtgacctctgcgagtccaacgccgaatggattgtggaggatttttctgtaaagaacgcattggctcttttcgccaacttcggcactgtagtattctccaatgcagttgctttgcgcggtgggataagttacggaccatcgggtgctcccatcatggacatctatcaggatcgaatcctcacatctacttctgtcaacgacaacactgtcaatatcagttatatctagttctgacaatctctagaacaatccggtggaacattgaaattttataacagaaatgaaatagaagttgcctacaatgacctcggcataaaaattacatcgtgctttctatgcaatgtatgtccatcccgctctagtaactcttatcaaacggttcacggatatcaagaacgtgggcagcttttccctgcagacatatctaactactgactgacgcgatattaggaatattcatgtattaacaccaatatggagagaagaagccagctttcttcgattaaaaaatggcatttacctgtgataaccgaaaagagggagattggggacacacaaagcaaacccatcgcataatttattatttaaaagttggatagattattgttgtccccatttcttgctaatttggctaggtttaaaacaataggtgacatcgaattctgccattaaactagaaatgttgtatcatggtcgcacaagtctatccagacgaaagagtcgaccttttaggatcatctggcatttgtattccatgaaatcgccagagagcatcacatatcacatcgtaacaagccccgtatcgcacaaccttcattgtgctaaaatcgatcatggttgaagaggctcgtggatggtgaaacttttgtgtcccataatcaacgactatatctgccacctcgaggatttccggctcaatgccctctaccacagtctttgttccctttccgctgatattggccgaagatcccatcagaggaagttcctctatagcagcaagtcgagataattcttctagcaaaccacccccgttggctaacattgctaaagtgtccccagcaacgctctgtgctaatgcgtttggcggaattttttggataatcggatggtcagcgcgatatggtgcaatgattcctagaggaaggtccaagtccacggtcaagagtttgaccataccggcttctttggggggaagaacatgaatatctcgatgcagattgtagcttccgaccattgcatgtcgcttgtgtggttcccgccgttgatcgcgatgatcccgtagccaacgctcatcggaataatcgcaataccaccccgtttcagaacttcgaacaccgctctggcatcttcttttgggctcggtactttatagaaagacatgatcattgtatgaaagatttgatgtatttgggcatcagagcttcattctagtcatgacaagtggattaaatctcatttaacaatatgtccaataccgagggaaccgagatatgtaacacaaaacacaggaactcatgtgaatgaaagtgtaaataatctggcttgatctcattcccgagtgacacctgcaatactactcttttgcttcaggtatcaaggagccagctcattcaatgttcacagaggactcgttggaaaggaaatcccctcgattggcaccttcgttatctctgagttgggatgtagtcacattggataattcagttggccacaccgcatgccaagttccctgtgcacgaacagaatattcatgtcccttttcgaggcctggaatcggcaaattcacagttacatcaaggctgtgtcgcgcttgtatctcaacgagatcatcctcggaggcaggtagcttgcgtgataccataatagtagggatgggcagtttccgttgggccgttgtgtcacaaatctggaagacaccgagaacaccagcctgagggtccaatggactgccccatcttagaatggtgactggtgtatctgcggcattgtgaacagaaactttgattggtagagcaaatgaatcttgtgcttcggagattggtgcctgaagggccacggtgacctgtaaactcaagtttgacatagttgcgaaaaagtcgtttccgtgatcaaggtgcgaggagaataatagaatagacagccggcaagttaccagtagtatcgcgggccttgggttgttgaaagaccagaggagagaatcttatcacgccttatatctggaattgttgataatgttattgatctctcatttcaaccaatcaaacctgttaattctatgccaagccgactgggcaggccgctccgcattcctccggggctcccgtgcaatacactcctttctcgtagacttggcaccgcttctcgtcccaaacgggcccttcatcacgatagccaagcctctatgatgttaccccaaatagctgacactaagcactatttctgaagtcaagacttcggcgccgtcttgggtcgtatcttggcactgtcttggcaccggagtccggagacaaacgcacggtctggggcttggcgtggtttccggatcgttcagaatgatatgagctgagctgttacctagtaggttgtatcattatcataggcaatttgtgttgatgttcctatcgtacaatgtctttgtgtctcacaaatctaacaatggtggtgtacatatatttgtggtatattcccccacggaatgatcttactttcaaaagttaataccttagtttgtctatatatatctcaaacacaaaggtttacatagagacttgcaacttttaacgccaagtctttctttgtctagaaccgatcgtgaggagttacatcgagcaagccctcgcctgttgaagcatgatgtgggatcaaattgcagtttcataggctttcagacatacgatccatccttcaggggaacggatttccgtcgggccaaggacaacatctatgatgatcttctgaagatgcagctgtctcaatatatctctaaccagtgacaagattgcggacggcctgcccccgggatgttgttatctcacgatacattcgaccagtgacaagattgctcgcaagtctcccgtgtccatcctatgcaagcgtggcttctggcgtgatcagattgtttcatgcagagaggtaaccaccctgtttcttccgccatccttctgggcaacgcggggagatggaaggtgtacaggagagaggagaccgcggcattccattcaaaacggcatcatgtgtccagtggctataaagcaggcgttcttttcttcagaattgaatctttcttattccagcagcatccaagatatcagacttacaacttcatcttcttttagtgaatcaaccttttgacatccgagcatcatgcgttttactgccctttccacggtacttctggctctagcacagcatgtgcatgccttgccagtcaaaaccaacgagacttctgctctcgatatcaccttgagtcgtgtcactgacacccgtatcaaggctgtcgtgaagaactctggcagcgaagatgtcacatttgtgcatctcaacttcttccgtgacaccgcaccggtaaagaaggttaatgtcttcaagaacggtatatgaaatttctccagaccttatcagtttaaagctaatttaatatcagatgctgaaatcacttttgagggaatcaagcgccggttcgccctcgagggtctcgctgaggaatccctcacctccctcgctgcaggagagaccttcgaagatgaatttgacattgccgctaccagtgacttgtctagtggaggcccattgactcttcgttccactggcctcgtgcccctggtcactgatggtacagtcactggatatctgccataccgttccaatgatctgaagatcgaggttgacggtgtcaaggcatcccgagtgctgaaggctatcaagccgctagatcgccgtgctcttcaaacttgcagtaatgcaagcaagaagtctgcacttgccaatgctcttaagaacaccgtgacgctcgcaagcaatgctgcagaggctgccctttctggatcttccactaagtatgtgcataccgttctactaccaattaatcattctaatagcctcccataggttcaatgagtacttcaagactaccagcaccgctacacgcaatgtcgtggctgctcgccttcgggctgtggcaaaagaggccggctcggtgactgccactaagtactactgcgaagataccttgggatagtcagtaccccctttcgataaaaacttgacgtgcatatgactaacaaatgtaatacaaatagctgcgaaaccaatgtcttggcttacactctgccatctcaaaatgtgatcgccaattgtgatatctactacagcaagctcccagcattgactagcacatgccacagccaagaccaagcaaccacaactctccacgagctcacccatgctcctggcgtgtacagcccgggaaccgaagataacggatacggatacagcgccgcgacagccctcactagcgcaaaagctgtgttgaacgctgactcgtatgcactgtatgccaatggttagtgttcgatgttgagtccgtttgaagaaaatcagctaatcagcaaacagcaatcgcccttggctgctgaatggtcaattctccgtacaattgctcccgggggtgacgtacgaagaaccgggatcaatttgagttcgccagataccaagttggatacatgttctgatgaggtttgcaaagagagactagttgtggcaggatattggttgagaatataaatctgcagtgatgataaatatcttcgccttgttgtaatgtaaacatagtccattgcttgaaaggccgtactacacgcgtacacagatcgggacggttcctgagttcaggactttcttggccttattcctaccactaatgattactttgcggatatacaagtcttcggcggcagactcgcactctctatcataatattaagattcaaggtacaaagcatcacctagtggttattttctgtcacatgagaaaagacctatgtcgactgcgctaaattggagaaatttcacccagagtgcattcaggtccataatacacgatagtagcatcactttgaggaattagtaattaaacgaacccaaagtgctttaaaggactagtcctccacaggcaatgcaccctcagcctgcatctcgagcgccacctcgtcaaccttcttccatacccttaatagatttcctcctgccaccttacttgcatcattgtcactcactcctcgtttgagcagctccttaatcagatgcgggaacctggacacatcctccaatccccgaggaaccgtcggaataccatcaaaatcactacctattccaacatgttcgaaacctataagattcccaatgtgcaggatatgatcagcaactcgttccagagtggcgtgagcagggtcctcgtctgggatcccatcggcgcggtcagaagccgtgcaggaaatgaagtctggtgcaaaattgaccataaccagggagttcttctcacggaccagctccaagatgtcgtcgggtacgtttcgcgggtggggacagatcgaataggctgagctatggctgtaaatcactggagcacggctccctatccactcggacttgccggcgcccagcacatcacgcatggtctccgtgctgacatgagctaaatcgacgatcattccaaggcggttcatctcaaaaaccagcttctggccttcttcgctgacgccatgccagagaggatcggacttttttattccaccgtctggaagttcgagaatggcggcgtcggcatatcgattatggcaattatgcgtcagagttgcgtacgaaacccccagctcatagaagatccggagatgcgccagtgagttgccgatcgaatgtaagccttcgataccaagcggtgagatgatctttccctcgcggaaagcggacatggcagtggtaccattggggggcttcgagaaaaccgtgggatatgcttgttgaactctcgacatgatatccacctgctccatagtctcacgcacgcctatcattctgatgtgagtatgtgtgcgaaatccatcgtaccaaattctcttacttgatgcataattctcgtcggagaaatcggtcccattcttgggacaggggacgaaaacactccaaaatgtaccaccaactctaccttgttttaatcgggggatatcaacgtgaccaggaaatttgccgttgacaaaagcctcagtgaaattgcgatcatttacgcggttatggaagagttcccgaaccaggatgggaaggtcatcatgcccgtctgttttaggctatcagtcagagttattcccacggtttttatctatccaatctccataccgatcaatggagtctgagacaggatcttctgcaccctttcctcaatgctcagggggagtaaaggagagcgcaacagtgtgaaccaggcggtggctacaatgatagagagaaacaaccaaagtatcttgaagggatggttcttctgcttcaaagttggcgcatctgcttggctctccaagacgaggctcttctcttcgctcattgtggacatctagagtgttacgaggtcgaagagcggagatgcttatcgataaggctggcttagcctcggcacgacctcggagtcttcatgctagtcgatagttcatgacaagatcagccacaaaaagttcataaagagtagataggtaatttcggtggactcaagtgatatatatttgtatgtatgtgtgcatcaaggttgtatatatgttggtgtgagtgcctaagcggcctccagggctaggcacgtgcacataacggtgctgactgaccagttaggcggtgagaactcgggtttaatctattcacaccgccttcaacccgtagatgccccggtagattatcaacttagacgagtaggctggccgggtcccttgtttaacatcctttgggatttccaggacttcattttagggaagataaacataatctcagttctccatatcgcaaaggcttgccataatgcagcctggcaagaccaccgccggtctactcccaattccggcagcagctacgcaaaagtcgggctctggagcgcccgcaaggaaaacgcctaagcctcctgctccacgtctcaaacttctcattcgacgtttgccacccgggctaacacaggccgagctggagagtgctcttggggaccagtggaaggctggagcagggaacgttgactggcttcagtacaaacctggcaaggtgtcgaaagagtaagattcaccttcctctgatgcaaaagcgtatttatttcgactggctgacgggacttcttcaaatagccccaacaaaccgtctcgcccgtcaagagcatacatacacgtcgtgtccaccgaatgtgtctctttgctctcggacgctgtgcgccaggcttctttccaggatgcccgtaacactctacacgaccccattttgctggggcctccgtcgctggagtttgcaccttatgccaagacccccggaagccgctcgcgcaaggatgctcgtcaaggcacgattgatcaagattcagacttcatcgctttcttagaaagcctgacccagcccattaccaggcctgtggctgtggattctacacccgatggcgaggacaagaagaagcaagccgtaatgaccaccccgctggtacagttcatcaaagacaagaaagccagcaagttaaaggacggcagtgggtccaaatctaaacacagtcggtcggacaaggaatcaaagcaggagaaggtacaagcaaagaaacttctacaacgaggcgataaggaaccctcggcaaactcttccgacaagaaacccaaaggagaaaagacaagcaaagactctgtcaaagcaaccaaacaaggagccgctgccaatgccaagggaggcaagtcgagtacgacatcaaacgctacaaaggatacagccgcggctccagagcggaagagagagcgcggaaatgtcacagcagccaccaagattcttcagcgtgatcttggactatcgacatctggtgggcgacgacgcgggaaaggtacttcgactgatactgcgtcacctaagaacgagagctctcgagactcggctattccatcagccgatctgtccaaggaaacaaccaggcctcctaaaaccgcatcatcctcaaccaatgctccaaagcccaaggacagcgagtcatcctcgcgacccgatgcggctccaccgccacctgcaaccttaccagccaagtccactaaagctggcaaatccaagcacccatcaactgctaaacaagcattcctcaagcacgccaatccatcccagggtgtgaccgaggcacttctgcagtctgcattcaccccatttggagcagtgacgaaggtcgagattgacaagaagaagggattcggatacatagattttgctgaaccggaagcacttcgcaaggccatcgctgctagtcccgtatcggtggcccagagccaagtggtggtcttggagcggaaagagaaccccggaatcgaaaagtctcggaagggacgtgaggggttcactgccaacaagacgaaggctcccacggaagcttctgggagcacttcaggtgctggcggtcatgtaactggaggtaacgctggctcctcccgcggatctcgtggagggcgtggatcacggaataagggacccaagagtggagcttcagagaaaactggaggcaccgaggcggagtgagggcagggcctacacattgagttctttagcaattcacgagacatgataccagacggcatgacaggttttaccgacaactacataatggccgcggcaaagcatttgatttgatagactatacataaccaattcattgaaccaggcaataccaatatttcgatgtccgaaaggatgtcgcagggttatgaaaccgatgaagaggtaaggttgaagcagaagaaccgtccgagacatcacaaaactaggttcgaccagtactgtcaacagacaaagcagcgagcggtctacaacgtcttgaggaaaaaagtacgaacaggtttgaatctaaatgactgaaaaaaatgaatgtaattttttgctatgtgcatgaaccccccacagctcaacataccatctaccaagaaggaagaggacctttcagacctcctcgacacccaccaggaccgaccgaccgaaatcagacgtcgagaccaggtcaagatcatcaccactccctagaccgaaacacagacactgcgaacagcacgcgtgacagtcgaggcgggagtaaaaaggtttcactttagggcatcgaggacatgtagtcatcagcaagggtggagattctgtggctcttttaaagagtttagaaaggggacgtctactctaaagtgattctttgaactgtgaaaaggtcagcaaaatgttcgatcacagtgaaaaaatggttttctgctgtatgggggggaagaacatacgtagagtcgcttgaaaaagagaagaaggtctgggggcttgggcttctttatattcctgccgggcacgctagtgctaagcgagattgtcgtgtatttgtctggtttgtctggtttgcttggtttggctgttctccggtgggtcgtcctgtccaatcattttcttagggcggatccttcattgaaattttcaacttcagcgttcttctactcgtctgtatcattttgcattacttgattatttgtcatttctctaattctatgtgtcactcaatatttcctatctattcaaaatacgtaataacagaacctcaagaagtacgccgtacatgaccatccttctcccgaggtcgggccgcggacgcttatcgcttatcgcttatcgcttatccttgtatgcggggatctcatccaaccccagacccgtggacttgtagactcttcaagcatgccacgccccaaggtccatccagcgaatcggctgcgagcgaacactgcatgcactgcctgtcgtgcatccaaaaagcgctgcagtggttatttcccatgcaccaactgtatccataaaggatgtggccgctcatgcaccccattcaagtccttatcacacgcaggcctccgaagccctctcgtacctgcttcacgacccacagttgaggcgcctcggacacggaggggggtgtcagtggagtcgcaaagcctcctgacgtcacagtctcatgacattggtacgccccgtgtcgagcctgacacgcccgaagtgggatcgcactcgcctgaagttacgcatcggacacatccacgcatgctccgcaacctgcaaggggaacgaggtatgaacgtttgcgaccgccatgcatatcatttgattgacactgtccgcagtgtacgtcgggaaggccgcctctctatcattcctacaattgcttcgggatacagtgacccaacatattgggccctcgcagttctctcataatggggcaagtgaggatatgttagagacagaagctcatcatgatctgttgaatttctctggagaatgttgcactgttgctgagaaggagcgatttatccagaattaccacgcagcggtaggccgaataccaatcatgaagggtagatgacttactgacagtatgaaagacgagcggatttttcaatttgagctttagtgacgacgtttcatcctcattcattgacccagcagagcccaaaaccgatcgggaaaagactagggcagccatcatggaccttatggttgctatcggagcacagtcctctccgaatgaccgagaattccttcaggtggagcggttctacttttctcgcggtcaacgtaggacatttgccaacatgttggaagatcctagcgtggatttagtccgagtgtttctactcatgtccttctatatgctgggcgcatgccgtcgtaacactgcattcatgtacctgggagtggcttcaagagcagcagtggcgcttgggtttcatgcggaattttcaggttcaataagccccgatgagagtggtgagagaaatgaacggtaaaagcttctcgcaagatcttctttggcccagctaatctcaaatagatcacgattgtggatgagcttatgtattctcgatttgcttgtcagttcgatcctcgggagaccttctgctatatcacctctattacccgagaatcgacagggacctagttggggggccgcaccgagtgatcctggcctggtggcctcatatcagctgtcgttgatcctcgataaaatcataaactgcctttacagtgataaggccgcatccgcacaacaggcagacctgctattatgcaaattaaacggctggggtgaatatttgccgagttcattaaggacgtcgtctttaggacatcaagaccagagtactttccaagagcatacaattggaaacatgcacgttgcatgttcatatcattttgctgtgatcttagtcacccgacctttcctcgtctcggctttaagtgtccggctggcccggttacatcagagtctgtcgaccggtgatcccagtgaggtgcctgaggaggacccagcccactctcgtctcgcagcggcatgtattgattctgctgtatacatgctccaaacatgtctagaggttcataagtccggcctcctccttcggaatatgtgtattctcaagttagtctgcgtgtatatttatctagtaactccaatactaatctcaaacagagcgtttatctttgccgcagcccttgtactcgggttctctatgttctctcaccgtgacgtcgattctgagattgatgaggtattctgcggtgccctgaccatcttacgcatgctggcgccgcagtctgcccaggcagctcactacctagagataataacaaaactcgaggccgccataagcaaacagcgccagcaactcgctacccaagcccgacagcgacggagtcaatacgtcagtcggatatttagcatgaacgacagcccggcaacaccgcggacaccaagtgaggggaacgaagaagaagcaaatacgaccccgcatctatcgcagagtgtcacatcaaatgggtggttagattcaaacgacagcgcagctgctgtgtcacctcccatgattgaggggactttattcgactgggagggtatgaatttaccattatgggatagttttccattcctcgcggaatcgactacgatctaatgaaatatactacacttgaattataggtttagttgactaggacttgagatgtcgatcaattttcttctaaacggacgacttcacggtcggaaccaagaatccagaaggataaaggttcgaagtgtcccagtagagctggtaaatatcgtcgacatccgtagccttcagacggaacgaatcgtgcagaagtccattctcattttgccacatgagatacctgccatagaaaagaaattgatctaccttcgcatcgtccggtgtatcatcgtccccagtgaagcccacaggtagcaccttattaggcgtgggacggatgtagaagaatgtgtcagattcaaaggtgtaatccttgttggtggccgtggcgatgatctgggagttattgaagacaactaatagagtatgagccgttgcctggttaaaagaaaagcgcaaatgcaaatgagataaaagagaaatatcatacatgtaacatcggttgtcaccgatccagacacccactgagacgaatcgccgacatatgcgagtcctaggtatcgggtcagatgggagtcagactcataggggaatttataataaccatccgaataaaagactttcactccgtcggatgcgacaccgtaggcaagaatggagaaggatcctgttggatagcgcttttgcagctccgattcagagggtgcagctataacttgcaaggccaaagccagactgatcggtagaatattcaatctcattttttgttttcgatgatgattctggagagaagatcatttagatatcagcgctgggtgtgcggttgggcagttataatgtcttattgtcagacaattaaccagtgaccagagacaacctggaaacagactagggtgacgcgtcagatgcacttgacggctgctacttggattaactgcgtaataatagggtttaatatatgaagggagtcgatttgatttggacctgatcagaatctaattaatatagaaaccagtggcattactacatgcaatatgaactggaagccactacaaataacccccggtctcggtgtcagccgaacaatggcaagtaagcaaggtcttctgcattgtaacccctctacctgatgacttctcattggtaactgaggaaccaatgtcaatgtggcttatttcttggcatgatcattgaagtcgaaggggaaatggttcaataaggccaattccccggttacgagtaatcaaagccaacggcgagctcgttgagctgcctcaaccgttccataccaattgctaggaggtggaggcggcagctcattgttatccctctaagcttgtaccattcactgacagctcacaccttccagccttggaaataatacgcttaaggggcagttcatgtttggcaggttcgacttgatgtatttgcactcgatatctcatcaaattgctatgttctacttgagcatctatatcattcgccatacaaccctgcaaaaaaggacaattgaagtgccaacgtaactcaagttctactagtatttgccacttgcgaggtcagcttagggtatctcaagagttaagcttactcggagcttctacattagtcgtatgttgagattattatagtcattgctttgcctatattgcttagttcaaaaagatatgtctcttaaaaccaacactctcaattgccttaaactcagacgaagctcatgtatctactattcctagattacaaaggaaaacaattaaccctactaactacataactacaacaacaatatactcacaaggaacgacatgaattgaatctgtgcagacaacgagaaccgcccattaaacgtatttacccaacacagcagcggaatgagatatcaaaaatgagatgtcaagacagaatgcaacaaggcttagacattggattcagaggagcttagtgagtgatagatatgaaatgggcccagagatgaccgtgaggaacgatgtgctagaaggacaggagaataatgagggaaaatgtaaatgaaatgaaagaacagaacagtccggttacccacgctcccaataatactcaatgacaatgacaatgactcagatgcacacgatgcagaaaaaaaagagaacagagttgaaaagaaatgacggcagagaacaagtgggaaatatgcaccgccataccgattagattggtcggaggaacattcattagatcaacacctaagacaagatcctcgaggtgggagggaatatcttgagtttaggatggacaggcgctgctagcgcctgtctagaccaccgagccttttcgagaatgtcgtttttttggattggcggaatatccaccggaagcacattgtatcggtcaaattgctctgaatagagcatacaccaatccataggatcaattgtgatccacgcggacagcacagcttctgttcatgcgatgaaaaaaaaaaaaatcatgaaacaccttattgcgccggaatcgatgcatgtctagacaagaatgcaggctcggtggatatggacctgaccaatatggccagacacaggtcactgagcgatgcaagaaactcccgcccaaaacttaaatgaaatgcgtgtagatcttggaattctcatgaacttccatctcctgtattaatgttagtaatggcacaatcgaagtatagaacaatgcaagtaactcaccatcttgaagttattaatctcctcccgaatctgttgagcaagcaacggggtgagacggttgcaagtcgcaatctctccacgtcgatcgtactcgccgctaggccaggtttcgtggaactggatgcgaggactgaagacgatatttctaccagcaacatttgacggggtgatgggcgcactcttcgcttcagaagacgagaaccgcgccgagaggaaatagtcctcgccggcaatctttaccggatcattttggtgagctggggatcgtgacgactcgtcgggtgtgggaggagcactagagtgcggtgaatcactaccggggagtgcatgtgcaggcgaggagacaccgaaatccgagtgagtttctaataaggtcagtatgctaaaatgtcaagtgtatttgtgtggagatacgcactcttcaagatacccttgcggacggccgccaggatctccgcccgttctcggtctcctcccatgatgctcttacgcgactgagagttctccgatgcggctctttcccgaatggaaacggatcgtctgacctccgatgcattgtcaaccttagggaagacagtagccccacggggcaaatctgcggggtcggggttgacagcgacacgctcccgttctgcctcaacgttcaccacggtgatctgcggggctggaatttcggggatcgcaccctccatggaattgatgctggccacggatttaggacggaacatgccaaccaatgagcgagtggagcgcttcatgcccttgcccatcttgcgaagcatcatcgacgccgaggaggcggtcgatgacactgataggttatcgttggacccggtgaagaaatggccttgatgggaatagatgctttcacctagtccgctcagttcctgctgctcggcaatagcggcttgttccgggccaagttgttctctcagagcttcacggcgcgcctggtccgcggcaaatgcttcccgcttggaagcattactttgtgcagatgtcttgaggagctcggaggcactgccaaacgagaaagcccgtctcaggcgtgatttcccggggcgcttcgtgtccattttcaaatcgttgagacgcttcgcagcaggagaatccagtgtaggcggtggtggctttttcggagcttcggctggaggtttgggtttgggggcttcgggttctgtcgataccggttgcgataatggcgatggcttgctcgtacgtttttcttctgccttgccggtcttgctagtgacggagttggattccgatggcgtcccttctcgtgcctgtgaaattgacaccgttagcgctgcattattcccatgcgaccttgtgaataatcctaccgaggaggccgacgagtgtgtcgagttaacgctacccacgctatcccgctgagagtgagaggaagcaggccgttgattggcatcaaatgtgataaagtcgtaggatcccgattggggttgagaggaaggtgaggtcgggaaatctagcggcaggtttgggtacgccgcggcatccatattgcccagacttcgtcgtcgatatcgttcgggctgggccctatcgacataagatgaatcatccacacttgagacgcgactgtgggcgcttggtcgaactggtcgagggccaccaaaatcatcgacaatcacggtcggaatcggcgagggagcaggcgatgatggtgcggcttccgctcgttgaggggtacgacgataccggttcggggagggtttcggtgacgagatgttcatgatcgggggggagggaaggttggcggtagataggggacggagcggctggtcgctcctcggccgcgagggaagtgcgctatcgtccttggaaacataggaacgggaggaagagttggagggattggatacagaaccagctgcaggatgagaggatcgggggctggcaccggtgtatgtcggattcaccggcacttgaggggtggtgggtgcagaaaaggtgcgatgttctggccggagatgtggtgtccaagattgccgattctggacggattggcccatgtttgggttgtaggcatagggagccactaccgggtggcccgctcgataagtcccggaattaccagcattgaatgatgtccaagacatagtctggatacgagagccttgattctgggtggaagaagagaaggtgcctgatgaggatgaaggacgcgtctgaagcacaggtaccgtgccactctgttgcggaattgtttgaaccaacgcagccatattgttttccccagcaaattgtcccaaggaaatcacgagttgtccagggctgtgatctaaggcaactcgcaaatagaaaaaaaaaagagatagaatatgagcccgaggtgtgttcgtgtcaaataaggatccgaggaacgagatgggatgctgcgaccaaagagctgtcagctatctatcacccaaataagaaccctcacgttgttaatgcgatatgaagggtggagtttgtaaggaaaggggtcgtgctctgcgtattttttttttctcttttgctgtgcacgttgggggggaataaggaaccgcgtcagctaggggggcaaccatacctgttctaaagtaacgtggacatagactatagtggtacaacaattaaaaaaaaggacgcttgatgccagaagaatgaaactcgaaaccaggcgagttggaagaaacgaaaggaggtgggcaaaaaaaagagggagatccctaggatgatgagacgtctctagaataggagagccatgtacaagaagaaaaaagagagtaaacagaatcaaccccaggaccttcagatgacaatgacactcgaatgtgtctgtttcttagaagtgggaagagaagaagaaggggaggagatgagaggagggaaaataggagggggagagatcacggtagacacggggtagattaggtccgggagtacggactccaaggccaacttgaatggaattggaataggaattgaatggaattgggaaatagtatagggaaatggccaggtcagttaaatcggtcaaatagctagccaaaaaagagaaattcgtttctgaactaattatgcttatgcgtcgctttgcatgataggagtacgacatgtggtatttccatttggtatgtctacatctgtctatgttgtatgtctgtctagtattgtctaatacatacatactgactatatacatactacatactagctagactaactagactaactatcctcctacttcactcattaattcacctcctgaagccgtacataaaaaggggcccgacctccaaatttatgtgccaatcatagggctccccttgatgctccatcttgatattcttagacatcttcatagccacgcattctattctgagtcaagatctttcataaatatcttgtttttgtacacgggtccaagtccgaatgtatgtcacccggtacctgaccacagagactcctgtcaaactaacgcaaggcaaccttctgcagagaacgtgggcgaaggaattagcgacatggatccgatcggcctggcaccgcgtcccgcgatttgcgcctgcactaaactgtgacgctatctcggcttttccacgaatccacatgtgttcgaaacatcctaaagtacgtggatttgtacttttggggctttgggggcttttctctgtactttgtaatgcccaaacagtaagccctaatctgtcaattgagtaaaagactccccgcttaacccggacttggagtccaagctgtttccatgggttgtagtaatccacccaagctagttgacagttatcgagcaatcatattgttctatatcgtcttattctatttcataccattcctatctactaatatctgagacacttccaatgtcacactacgtaataaggctggatttcctagttctgccgtacagcatggcgtgatcatatctatagctccgagttgaaaatttagaggaacttaatctattttcgttctctacaacctatacacttgtgtagttataccgccggtcctaaataagctttatctctcaacctcaacggtatgtaaaacgaagccctaaaatgacatgagttcgtcggcgcaacaatccagcttattgacaccgcgccactccagggctgaacctcaactgatctctacttgtaatacctgacagcgttctcctttcagagtcacgacaatatcctcgtaaattcttatctccatcgtcagataccgtacaatccgacatctccgcgtcaaaactgtcccgctttcactccccacttgctgcaaaccactcaatccgtcgatccacatacaagacaacttcccgcgtgatcggcatacacttctttcccactcgagtcgtttagaccatttatcacctccgaacagcacactccatacacaggtggagaataccagggcaccgacctttcccgagcgtggaatttagcgtgcattttagattattgcgtactgagggggggggcccgcgtctgataccgcaaatcattgattaagcatcctgacgcccccgtttcatttaccagggccctgtgcgctgccaatatccctattcaaccgaatggggaaaccctcaacaacatgcacagtacgtggctgatcaggggtagccattcgggcacagaccaagggccagcctttgtgcagtccaaatcccgaatccacacacgctgtggtctgattgtttgacgggtggatatggacgcaaccggctctagaggccttcaacactgctcattcgtgcggagtatagttcatgtagggtgctacttaatgtacaacatacggagtacgaaggacgcatatctccaccgccaagataacgtcccaaaggtcccaggtcctgtgcttgcactagcattgagtcggaagtactaacttttagtatgttgtatccggggaagcacgaggagagcggattggccattgggaatacacatggcgttgtactgtggtattatgagcctcttagcctatttcgctcggatcatgtccgatattgttgtgtcatctgctccgtgcagtgccggtttagggtacacacatgccaggccttcacctttcctaacttggatgcaggggtataaaattctattttttgatctcctggatctcatcgatcttgtctcataaacatctagccaggattatataccttgaatcaataatcttggtcatcctccgaagcattcatatcatcttcatcgtccagaccctcaaagatcatgaacttctcatttttggcatcggtttcatcaggaacaacgtttccgtcttgaacctcgcagtccttcagcacggtttcccggccgatcttactgcgacgtccaacaatggtacccgttaattgacagcgttcgccaacaacagcaccgtccatgatcaaacaacgtgtcagccgagcaccgctggcaatatggcaattagcaccgatgatggtctccttgatcacacacttctcttcaaccgttgagttgttgtccacgagacagtcgttcctcgtgacggtacaccgctgcgcgatgctcgctgtgttcgccactttggaggcgtgcgcgaatgcagacgaagcaactcggccaacctcttcgatggactctagtttagcaagatggagagaggtagatagaaggatggctgacgaatccacccgtcgaacaaaaggtgctgtgcccctttggacgtaagcgagcatcggtggtagatttgacttggaattcttggcagtttgcgacgtaaacttggctggggtggatttggtagtgctcatgctctgtagatcaatctcttcctccagtgattcaccatcgagggattcaccgtcgtgactctcactctcccctagagtgagcccgtggctctggcgacgacttttctgctggaagatttcgttgatcttcagcttctcgctgaggccttgctgccattccgatttggcccaccatccaaccaagtcttcgccgaccgactggaattgctcattcaaacgagccatgtccttgacccagtaaggtaggacgtagatatgcgcatcacggtatgtcgtcagcaatttcacctgcgcatgcgtatccaccagggaatgacgcacaaggaagcccttgtcattttccaatttctctttcaatgtggccataggcatagaaaggactagcttggagagcgaggaacggggcgcggcatgagacacggtaggagcctcattctgctcaagtggcgcaactgccaggaagtctgtagcttcgcccttgacactctcctcccgaccctgtgtctgatagtacatgctgagtccattccgacgatccttctcgccgccacacaccatccatgcttcaagcagagactcgccgggtatttcgcaaactagatcacatggcaagagaaggaagtcggacttgatacacgcctgcacctcgggcagacggaggagctctgctgtgccagtggtcatctcgagttccgccggtgcgatgacagacggcgaagggagtgaggtaagatgtgggttctgtcgtagagcggcctggaggggagcgagcgaagagggaggagtgaccaaagtgacatctagcatggtcagtcttccatccgatgttttgcgacaaagcacatggcgtcacggaatgccccgcatgctatttcgacagtgggcatgggcttaccagtaatgcccattcttttcgaccagtctagggcgtaccagagcatcggacggttggccactgggataaggcattttgggtattcctcggggttcgaggtgaatgtattaagcgatacaccagggccgcacttgtttgcttgttagcttttgtttcaagatacatatatatgggaagctagttgctcacaagaattagagcctgcaggcccgttggtggtacagatactgagtgaggcatgttttcaactaacaatgcacttgcgagtccttacacctagtcatatatttctttgaacccgataagatggaggagtcagaaaaaccacttacataatcctaacctagctggagatggcacgtgattatgacccgtcctctccagacacaaacaggacaaacacgagtaaacacccgcggtaatcaccagccacatgtttctatgacccgaggggggacgcctgcctcctttccctcgtttcgcttctcccaacctcttattttgccaatcgacgtgtcaaatgcgacctgcgagtcattgcgaccgcgactaataaccgttaaatgtgccacctctgattgaacacccgcgatcgcaatgtccttccctcaagaccctcggcgccgccgcggcggagccggaactgggttcagctcaaccggcggacggactgccattggatactggctccctttggccttgactgctggaattgcaactatcagcattgcagcttggatttggagtgaacgaaatgacgacgaagatgaagacgaagatgaagacgaagatgaccgcccccacggagatgaccgccctcacccgcctcctgttggacctggcagtgactacccaccttcctatgctaccggggattatgcccgaagcacaggagcggaagttcttcctggagatgcttcctatgatcatagtatgatgggtcgcatgcaaggtgctttgcgccgcacgcctagccctcaacagatcttcgatggcgcgagcaaaagagttgtggccggtgtcactgctgcaggagcctttgtcggtggcgctcttacctcaatccgtgaaaatgataagggtgagggcgactacgaggaccactctagatggtcggaggaggctcaaaccagggctcacgagagaagccaacaaggcgctattgcgcctactatgagtggtggattgccgagccgtccagcaaatacgcttaataaggacagaaagatcgtcgcaattgttgtttcctcggtttcaccggctgactccgacgaatttccttccgaacatgctgtaagaagtcctcacccttgatacccactttaggcctttctgacaatcgcagtccattctatcccatctccctgaacatgtcgatttggaaacctctaagatctttgtgttgatttatgccccggaattgaaacacgccatcaaaaaggggggctcatctcccacaacaccctctgtggcttcgtcttattcaaacattggcactgaagaaggagtttctgtcggggaactgggctctggggacttgagtgcggtagagccccgccaggacgacgaattggagggcacatctcgcttgttcaaaacgttatacacacaggcacaagcgattgttgagaaggacagcatgatcatgcctttcagtacccctgggggctatgtgcacctcgcccgtcacttattccccgagcttgtttatgtccaagagtctttgactggagatcatggtgaacccgccatccatatcgctaattgggttcgccaggttatcgtcgtagtcggagatgagggtggccgtggtgggctcatcgacagtgacgacgagtcagcactcggcgagaaggaagagaaatggtggaaaaaggagggcgtcacaggactcggcaagcgcattgatgtggttgacgttgtccgagtcggagatgactggagacgacgagtgaatggtctggactaggtcagatcaagttgtggcccatgatttttatgttgatacttgtctgcttgcatgtctatacatgttttcgttttctgttaaaccccctcatgactgattgaccctattcccctgtttttttttcgaattttttgccttcatttgatacaattcaactttgatattcacctttgaccagaataattaatgtgtatggttcttttgccgcaagttgctcctatttccaacatggataactctcatagttagttcacttagctatgacatctgtagaattctagttgtaaggcattagattttggtagcggtatataaaatctattcaagcattgattcatcttcatacatccatccgaggatatatttcgaagtcactttaagctatttcgctctggtctctagccaagaagacacagaagatatccaaaaaggtttacatatatcaaaagactaccaaaaagacacgccaaggtcacatagccgctgacttctcttgtatgtattcaatcagtctcattgtggtatctcattgttgcatccattcaaactagtccgaattaggaatttatcatgtgactgacttcgcgcccacggcttggcatcatcagttgacctacctctacaagacctcgtccaacggcttttccgattcacgccttcctagcagcattattggacgagtgctttctttctttcattccttaatcccactcggtcaatctccgccgatcttccgcattgattccagctgtgctggggaccggtgtcgccctacttatccccacatgtctcgcgcatcggccatctcactcatttcccgagcacggctttcattcaacatcatcaaaccatcattccgataagttgcattcttactcactggccacgccgaggttgcgcaaccggcgcagacatgatggcgaccgcaatttccaagccggcctcccatacacagaagatgaagcggccgcccccgcctttcggccaggccgcggtcaacggagtcaagggccagcacctctcatcttcgccctcatccgccgcaaaacgtcttcccacgggagtctccgtcaacgcaacttccaatttcacgaatggcgcagcccatgtggcgagttccaacaaaggcccccttaatcggaccaggaatcagtcgcaaagacccatggatcagtcctcgcgctctggccggccagtaacgaggaccgctgcagcagatcaggcacatcgagttgggaaaaaagcaccagaaccatatggtagggagttctgtgacattcgcaatgccaatgcgcgcactaactttcttttcatagtgaaaacaacatcctatatccttaagaaatattcgaaatgccccccatccctcattgtgcatctacatcctacacattttcgatttgaacagcaagatggtagcttcccttacaactccgagatgaaggtcatcatcgagcacattcgtgctgggacagttccgcatgatctgattgaggagcttctacgaggcggtgtgcagttctatgaaggtagttatcgtctttgacaggtagtcgaattacctcctgctaatatcattaggttgcctcatcgtccgtgtcgtcgatcacaaatctgcctcggcgcaagcaagaaaggcatccactacctcatccaacgagaacaacacaccattctctctacacaactacaacgaacatattaccccatcagcttatgttccatacccaaaacaaaatcagcttacgtcggccacacaaggcaccaaggccgatgggacatcgattgccaatcaacaaacagatggcccggcgactagtgagcagacggacgacaaaagcatcaacttaggtcagaaaaatgctcccatgaagcctcgagtattcaccacagtactccatcccactgctcgaactttgcaggcagagttgacgctactggtcaccactccggacccgagagccagggcaccaattcaagcaagctctagttcttcagctaccccaggaagcaatcaaccagatcgtggacacgtcgcaaagagacagaaaatgctggttgaacctgaggatcttgtggaatgcgaatctaaaatgatacaggcattggcacctcctctcttcttggatcccgtgcatagtatcgaggctgcccaagagctgttcaagcacctggaaagcccactgcatcgcgacccgccgcccttgcccaagcgccgaaagagaaccgttgccgaacttgccgcggatgaagccttggcagcggaggaggaaagattcatgctcatcatggacgagcgtctggagcccacggcttctggtcctggcggtgctgcgaaggctgctgccgtggatgacgcgggtggtgtggcaccatttgaaccccgattctctcgcttcaagacacttgaaacgattcgcatgcaacacgaggagaaggctaaacgtgaacatgaactgaagctgaagcaggagttggccaagaggcaacagcaggagcaggagagagagcggcgccgtgcgatcgagcagcggcaagccgaggaacacgcgaaagaggaatcgcggagacagcaacttgctgcccagcaggcccaggcccaactcgctgcgcaacagcaaaatcgccacattatggctcagcccaatggcatcagccaaggccaacagtcttcacccgttgtgcgtaaccagaccgcgcttgcaacttcatcaccactggttggtaatatgatgccacaggcggttccgatgaccatgaccgcatctgggtctggcggtagcccaccgcgacctccatctgctttacagcatgcgcatccgaatgtcatgagccacccgatggcaccttcgagaagccagcaaggaccaagccgacatggtactccacagatgacccaggggacaccggctatgtcgcacgccacgccaataatgcgtaacgttacgcctactcagcggatgagtcatggcagtccaactcactcgatgggccataccccggtcatgaatcagggcatgatagccacgccgcaaatgaacgggggaatgtctttcacgccacaacagcagatgatgctgcaacgacagcaagcgcttcttcaggcgcaacaacaaggacatattcagcacaatcagttcacgccacagcagctagcccaactacaagccaatgcacacgctcaacaaaatattcagtctcatcaacatcaaatgctacagcaacagcagcagcaacaacaacaacaaagcagcagcagcagcagcagcagcagcagcaacaacaacatcaacagcaacaagcacaccagggtattcctaaagtttctcagcaaggccagcaagcataccaggctcagctcatgcgtgctcaatatgcgcagatgcaaatagtcaagcagcagcagcaaggccagcacccacaaatgcagggccaacaaacccagcctcaccaaggcaatcagcaattaaaccaacaacagcagcaaatgctgatggcagctgcacaggccaatggtggcatgggtcaaaatggacagcccatgaaccaagcacagagatatacccagctctatcaacaacggctacttcgcatgcgacatgatatgtcgacacgctacatggctcagtatggcccgccaaaccagtatccttccaatattgcgcagcagtatggccctggactggaaaagaacgcgaaagcgtgggtctccgaggtcatgcgacgcgagcgggatggcggacagcaacaacagcaacagcgggctgccttgcaagcccagcaaatgcaagcgcagggctcaatgcacagcatgggtggcatgaataactgaggctagtctgtctgctggcattgatcaaatgtggcgacatacgagattgttgataaccggcgaggacagaaacttctccacatttacaattgaccagtgtaaaacctggctcgaggtcgatttataatgagcatctacctaatggcagtgggtcattggttagcaaccgctcactgtctctgcttttggctttttttttttcgcgttttctttttgttttctgtttcttttctttttcagaaatcccggggttttgtacagggaccaggcatcgtggagattggggaggatggcgttacttttattgctttttttttctcgttcgattgtactattgcggcgcggctttcggtgggaaccctgggatttctcaaactcgataccattctgtacaggcgttatttgatatcacgacgcgactatggggtttgggttggaaattgcattgtggaaatacctcgaatttgataacacaaaatgcaagaactggattctgtttattctcctagacattcgtatagcagacattttgacggtgcagcatcggtctaagcacatctcaaaccaaagctcaaatgtcataccatcacgaggcattcaatatcgctttgaatttttactcaaactaagcccatattcttgaacaggaaaaggataagacgaagcacaatcaaagtgatattcatttcatataaacaaagtctacgaatacgggatgttccagatcttcaatggatgtttgccatctcgggcgaaccgtaggacaaaaatctagtactcactggctagggaaatagttaaatctccatttcgatataagcacttcttcggcgcgaccgcggccatgaaagggccggatcgcaatttgacatccgtgctataagctgaaaagctgtgtgtgaaagggaaaggcacataataatgatggtaagtattcaattagacacataaggtatcagagctatgaaaaaagggagatggggaatatcaaaagatatcgtcagtatgtaccacccagtaaaagaccgttggtcggtggccatcacttcctgagactgttctctggtcaatcgttactcagactgttgagcttgatatttttgaaacattcatggagaagttcatgtcaatagaaattggtgatcatcatagtaaggagagaccagagtgtctcgcgagatgtggagggtatatagaggcaaggctaaagccaatgaccaagggaagacattaatcccttgagcaatggctttgcaaagcgcattgttgtatggtcgagtggtagacaaaagatgtcggatttaatgtgaaggatctacggaaaatctgagcgctgagtttttatatcgtgtgattacataaatgatgtgtcagcacggccgagtccgtggatgactaaactggttcccgatcggggaaggtatcaacagccgagtagttatacatttcaaagatggactcatatgggactttggtgtcttatgacttggagagtactatcacccgatgaagaagacgagtggacataatagcatggtgcctgggctaagactggattggaagtgcattcaagaattaacaatacaatcaattccatcgaatgggaaggcgggaaataagacacccacgaaaatatatggattcttgtgaggatggccacttcgagacctcaagcgagggatgatcgccgcacatcacccgaggaccaagtaagccgagcgaataagaatagccggaccccttcactaacactgataaacacagactggagtgtataatgatgttgatgttgcattgcatagaaatgaatcagaaataactcatactaaaacaacccaatctcagagcctagaagcgactttattgacactctaatatcacataccaatgcatgtacaaagtacatcgtacgatccgtgcagttacatagtcagtgtagatctgtatagcgtgtatgcacggccaatcgaaaagggttctcacatataaacgccaagccagattgccattgcatggacataggtacggtttggttcggatgctagagggcccgtagttatgctattctaaaccctgtataatgtctcactatacgacattctaccctaataatcgagtccatgcgcatagacatgccgatgcggtccacgagtgtgttaataggcattgtctatgtggggagagtttccccctggaatgtgataaaagtgtacacattaacgaaacgttcgttttatctgatattttctaaggaaatctaacagaagaggaaaaagccaaaagcattcgtaatcgctgcagtgagatctctaaatagcaatggaacacgaagcgaaaacagtttaccgatcattcgcgcacgcaatctagaaaagaacaaatatttacggggaaacaatacttcgttatacaggatcaatagcctattagcgggtagacggatgcatttccagacggtatttcttataggacgaaacccaggaatggaaattaatagagtgcgaaggcgatagaaggtgattggatatcattcccgcataccatgccattggacggactccccattcccgatttgtacggcgtggcatatacatagcgcagtgtaactgttcatgcaggacatgggcgtcgggctaatttaacgtcgtgcctaataatcaccacaccgcacaatgtgccaaccatcggtgtagcgggtggactgagttatttggaatgggatttggaattcaagagtaggtggggagttgaggaatacggtttggaattagtggaatatctctgatatcggaaaataaatgaggctagtactctgtatattgtatgttgtacctttgaagatgatagatgggggtatatgccggtaatggatgtgcagggcaaaaaggccgacgaacaccctcctttggacttcgaagaacggtcagagattccatgcacgttgatcattagtggaaaaaaaaaatacgggtttgatccggaggtcaatgggtcctttctcatagggcattgatctcttcttttgctttgctcggaaagcgctcatgcccgtggacctgggaatgaggaatggggtgacgcatgaacacccacggtggcgaaaatccaggcacgtaggagcgcggctctacggtgtgggatccttggccatgaagcatgtccaatgtagcacgaaattatctttttgctttttctcattcccgtctcgtttctatacttgctttttcgcggtgctatacttagaactatggagtacgttggagggtttttgcaaggttcaagtcttcacagagaacgggtgaatggggctccacatggctgtctgatacatgctactagcgatattggtcgcgctgtcgaaagtggcgcaggtcatatagtggagtatcggctgctcgtccattgtggtttgcagtacggagtagtgtttcagtgcatattcggggcactgtgttccacattaaaagtataggagtattctaattgtagacgaacaatgtccatagccgcggtgtagagatgatgacatggcgtttctgaaacggggtgatgagaacactcccatttaggagtggaatgtgtggagagctccgaggacagacgagtgaaaagtacagtttgaccatgatcatgtctgcagcaggctcgatttgtgccacattgatccacttcatcgaccagatagatcggtttggagagatccaggaactaaagatctagagccccgagggttgtgatgtgtaacatttttggggcatgtcatagctcccccaccgtgcgagtggcgaagtgagcaggttccaagctgtagcagtctagcccatagcccagaatcctagtaagttgttaaaagggaagtggtatacaagaagtggaggcaacgagaatgcagtgcaacaatgtagatctgggttttttgtgtatattatgccagtgtgcgattatgggggtggtagtacaagcaataaatggagaaaaagaatagaacaacaacacgttgtagcagattgtacacgatcgcccgacccctgagggtgttcctcccaaatgattatcccagttggcgatctcccccaaaccagaacgggaaaaaaaagagaaagacatatgcaacgccgcatcaattccatgttcagaaaataaccccagcctttggcaccaggcaaattatgcaagagaaagagaaaaataaaagggaataaatcaaaaaagtcgcctctcctccaggagacatgtacaacgccgggcgagaggtcaatctggcctaaaatgccagtccgccagagacggggtatcaatagaggccaagggccaagtttgggttttgtgtttttataattccatattttcctctggaagactcatgtggaattggattttgtgttttttttgggagtttttcgattttcgattttgttttggtgcggtcattcggctaatcatcccagccatcgacgctcagctcgccacagtcaggcatagtatcttcaagcttgctgccgtagatgggccgaccgtcgggagtaagttgtccacggaaatcagggtcgaaatcctgactggtctcatcgagagtcgcaacgtagcggttgcgaccgccccgcttgctgtgggtcttggtgtagtgagcgttgaggttgtcgctgcgggagaatgcacggtgacatccaggaacccagcagacatgaggcttttccttggagtggctcttcatgtgacgcttaaggtgctcctgacgcttgaaacgccccttgcagccaggctccttgcacttgaactgcacttgcttgatgattgacggcaagttctcgagactcaggttagagcggaggagctgtttcttagaggacttgcgcgagggctggcggtgtcgttgcatcatgccttcacgataaactggggagagttgaaagtcttcctgataatcattgtgtccggacattcggctgaccggagtgtctgatcccgagggagtccccatagagacggatcggtggggggtagaaggagtgtgggacttgaaagttgggatattggtggggaagtcggagtaggaagaagatggaggggtcacgggtcctgaaggaaagggttggacctgagccggggtgatggtttgaggtaccaaggactcgtgggagggcatccagtggagcatattagacattgaggcggaattaggcatccgctcagtgggttgggtaaagattggacgagacaagcaagggttggaggccgattcaggcagatatccagcctgttgagggcggtggtagtagttgcgagccatctggttgtactgaggcatcgaggcctggtagggaaactggtgctcatggtatgtctttggcatatcctgagggatccaaagttggtcgacgttctcatcatacccaggaagatagtctgggaggggcatctgctcctgtcggtccatcgtgccgcagggcatacccatcatggtttcgctcgaggtgagatccgccatgcggaatgcgctacgtagcggggtagctgaagttcgacgctccattgggacgccgtggtgatagtgaggatggtcgtgccatccgggtgaggccattgagccttggctgtaaagactggtaggcgtgggagtcggagagtccaaaggagaaaagcccgaagtcatcgaggggcattcacttgagctcaaagagtggcagtcaacttcaacggtcaaacgatcagagatgtgctgtccgtgagatctcatatcgtccaagtcctcagtcttgaaaggccgagatgcaaccgagttgatagtgtcacctgtccgggggactttagcaattgttttgtgtttttttttggtgtttgtgtttgtgtgtaataaggaaaggcaaggtcaagcaattgacaagtagagagaacagagcgagggtcgagaggtaaagaaagatcaaatgaaagtaactataaaagaaaggcagggatggaaagagatagaggcaaagcgaagacaagagaatgtgtattaggtcccggagtatagggaaaggaaagaatgttcaaaagcaaagggaatggaggacaaacgagcagaaataaacaaattggtcctgcgtagaatcccgaggggtggagatccgacttacagctatacgccatggtctaagctctgattcggacttgggaccaaaattagagacgcgtcgcgtgctagaggttccaagcaaggctaggaatgtagactataagatcctccgttaccgcggcaaaggctctaacggctggatctgggctgggatcgactgaagtgcctcgaggcctgcaggtttgatcgatgtttcgcgctgtttcgcgtccaaacgggacaataaggtgggctggtatggaacaccaagacgataggcgatgtattggtgtcagaagccctttgacgcggtttaagatggacggttgaaggggaggctgggtctcagattggatcaatagaggtaggggggtggtgtataagtgtatctggcttgaggggaggggagattataagtacagcaaggagtagtgaagggaacgatgtcttaaagagcccggaaatcagtaaggcaatgagaaagcaatgatccacggggaagcttgttcctggtacctttttgggccgacggtgctgcttgagagatttggatcggcgtccctcgccttttgttttttttttttttttttaaatcggtttaatatttagtattattgtgtatattgtttattcctttggctattaatacaagattaactaaaaggatcaatagccagaataatcgggaatcccttttcggcctacccactttatagtacctcacctataatccctattaattctggttcatgcatcattattcctctccaccaatcctggatcatgctcgctgtactccattggaatgtctaggctgtacctcttaggttccgtgaaatgtgagcagagtctatttgtacatgcaggtcgatctcgtccccggactttctagccgtgtcgatcatgatgcacaacccatctacgactctatgatctcctattactctccactctaggtctcagaagcaacccttgacggcgaaaagagtatttatgctcctgtatttactgtcaaaacaaaaatacccaatatttaacaacccgaggacacccagagacacacggaaataactataacccaaaaatatgagctcgctcggacgatagtggaggctggatcgatctcattcgtacttttgcgacaggtcagacgtttgaactcattcgggtctgtgcaaacctggttgacgctgcatctctcccggagagtagcaatctcggattccagagcttccaccgacaacattcccctattcctccgccttatttcctctcgccaagagtgtcatcgtcactggtggatcggccattgtatttttataaaattcaatttgtttgatactcttttatcttatcttttcctacctgagtctagtccccgcccctccacccccccgacccatccgccccacgatgtaagccgtacatannnnnnnnnnnnnnnnnnnnnnnnnnnnnnnnnnnnnnnnnnnnnnnnnnnnnnnnnnnnnnnnnnnnnnnnnnnnnnnnnnnnnnnnnnnnnnnnnnnnnnnnnnnnnnnnnnnnnnnnnnnnnnnnnnnnnnnnnnnnnnnnctccacccccccgacccatccgccctacgatgtaagccgtacatacctccagggggtccccgtacggacaacaaatcaattcagtcattcggtctccattggaatgtgagaagataaaaaagcaaaagcaccgcaagcctcggggaacaactgtcatccatcccgctgggtctgcgaagagaaaaaaaagccaatccgccctaacggttcggacggtgtcgggctaagctggcacttgcgtctgacccatcacgcgtcagttgagacccgaatgatgggattgtcctcgatgttgcattcattttgctctcgacctgcgtggctaatagtcggaggccaaactttcgcattcttctttggatgctcgttccacgaccgtggccactcatttgaaacatgtccccgtccagatagtgatcggcctcgaatgtttgtcaccgctgcaggtgtgcgaaatgggggaccggttctccatagtaatgggaattctgttatctcactgtttgccttggtatcacatcgcgtggatggagatgaaacagggcttatccgtttgaccataaggctaacgaatttcgccttgagaaaaaaaagccgtactaacctcattttagcagtcagattaggtttcaactggactacaattgctggtccgtacttcttttcctcggcccctcttttttttgtcgatcgtttatcgctctcgcgtcgatctgtgtccgccagtgcgatattgctctgtatcgactgtcagatctagcccccgacaagcccccacttcacttccttctatttcttgcatctcaactacttccttaaaatccttcgccacgctttattgatatacctgcataactatcccccatgagcttgaaaaccggtttgacacgcttcttcggggtctattgacaagatgcatttattcctgcagttagtcaagactattgtactttgtgtgagtcccgaaaacctggaacctggaagtgaacgagccccgccaagacctaagctaacggaggttgtcccatggactttctgacttctaagtttttggttaaggttccctgactcgggttctatacatcgacggagtacataaatgtaaccttttaaagttatacatagactttcagtcttgatatctacaaatggagagaatctatctgagcattttgtagcctgagcattttcgctgatcaatttcctaatgcttagacctcagtgcagcaagggtgaccgaatcccgaaccccaaaacagaaaggtgttcccccagatctgtcggcccctgcgtctgaagggacggacttcaccttcgtatagggtttcccttcaccacaaacccaccaaatccgtcttcatgcttcacttttcgacactagagaccacaatcaccaactagatatcgtattgcagtcgggcccgttcctggaacctctagaccactgctaaagtacctactcaacccgcctaatccaccgcaatgtcgtgatcatcgacgctggaaggtttcgatagtgactttgctttcgtcgcatcgagtcatacctcaatctgcacagccacctcagcctacctggtcgcgccacccgtagagtgtgatcgctggtggcttgtgaatggagtgtggcttatctggggtgatcgtcgagatatcgtacatcttaagatctacagtgagtctctcgccaccgctgttgactgcgagatttttgcctgtggttttttggggctctgggatgacttgttgaggctctctatgtatgatcccctgttgatcgcattgcttggtttcggatatgtgcagcggtggcgagtgaaacatcgaggcagactatctctgtccaaagtacatgtagttgccctttttcggtaatcacatactacacgattacgtaccattgctgcgtgagatcccaggctagatacaactatgttgtacctcaactaatattgtactatctattattgtgtccactcgatgattgacattcttcggtatgcacaacactgtgtctgagggcaagtgctgacgggtgccactgacgcaactgcgaatgtccctgaattgtacttcggatttgtgatctcataccaatacttcaataggttcgatatgcaatctgcaataaaggttatcagcctcaaagcgcctgactactacgatcggggaccgtgcaactgaattcaaatgtcccaaatcgggttttgttgcctctatcgctttttgcctcttatcgaataatttggccgagtgaaacaagcattgtagaattcacaaagtaccgacaatgatttgtctcatagaataatttggcatttgggtcggatgatgcagggacgaagttgagcggcctataggaagtaagcatcagcgataggctgcaaaagcgatcaatagtacacaacataagaagacaggcacagatgcgatcatgcacaacccccgaaatggcacctagtgctctctcggtagtctctcggtgttgccctggcctagcaatttcccccccgtcaccccgcccccttacttttttatttccttttttctcttcacataacggtttcccgttcgctcacaatggcattaaaagaagatttgatttgctttttcaattcgcttttcctccaatgaatactccacgttgacttgcattgcattgccttgcatggaattgttcccggtttccaggaaccagcttaattgtggcaaaagtctatgcgcttaccctaggactctaggtctgccctattgaggtattcttgcctatggtggatcctcctctaaccatcttagtcgcactttagggattccccaggttgaatcctcgtgtgcccgtggacatcgtacctgtctgccctgtctactccttagaacgcgatgtgagtcgcgatgaaggagcacacataccactacgatacttaataccatgattcgcgactccatgtgaaaaaaatacattaagtttctattgcttgaatggttgaatcaaaaaacaataagaaaaccttacagtgtcgtagagatgcagcgttgcaataattccgcccgtatcacataccagcgcaagcacactgacctgctctattattcactctactggcccatgcatgcccgctgccacaatcttatgtaactcagtccatactccagggctaggaccaaagtagctatgtacccacggtaggataagcatgcgcccgaaaaaagaaaagctaggctcgagtccccaataagagccggatcgaccctgcacatcggactctctggagaatgtcagacatgggtgctttgcaggacccctgcagcgcacgaaccatgtctagcctgtgcggtcggcgacagcgcgctctgattggtgtgattgcggatgatcgctggtgggaattcggtgatatcatattattggggcccttgcgccttgtcggtgcttggctggcctacttgggagacgtacatgctgttataagatgtggtttcatttttgctacatattggctctagggccgcgactccagtgcacgactatggagttgtctcgagtactattcttactgtatcttggtttcggggtgtcgtgttaaatttggcttgctaggaccgcgacgtgtgcttgggatgaactcctgtgacgcggattaaccagacagggtctctgtatatcattcttgacttgttgggtttatacgcgctctgtgccgccttggattgggcacggccggtctgtgctctgactaaagagtgatcgtcgtaagctcttcgtataggttttctgagcggaaatgtgaagttagatgactagtgctgaactttatagtcttatgggaccatcacagcaaaagtatagcaaactgatcttcacatgggctattccgttctggggtttgacgtttctgatatcatttctggcgtacttgtagatatcctcttccaatccttgtccatctactcaagcgtaagaatagcggacaacagctaaaatcgtaaataacagaatacccaaagcagcctacatgatgattcgagaagactgccgcaaatgaacttgatgtgggatctactagtagttctgggatgagtgtagtgaaagaaactttatgatcttatggtggtatggtgtgatatttatcgagtggggttctactagcgatgctagcttgactgaggatgattgcacttgaatagcaagatgtattctatatcggtagggatatgctaatgtgcgatggctaatctacatcatactctctcaaattgtatgttctacgttcttgaatgtgaatatatatatcatgattagaaggcacagaagacatagatttgagtatagcgccttctggattatttcaagtacagaagtatgtttttctcaccatcatcaaatcgtatctttatttcatatattaagctacgtgagcggtgcatttacttttaattcgcctaatcttctcttccagttgggaccaagtcgtatagcagtaatcagcagtgtggtggatatttgactcttgtctggtttcgaattcgagagatcgcgtccgcgctcacagctacatttcgaagtgttggactcaacacggtatcatattctggcagctacgtaattttgataaaagacagtagaatttattatcaaactaacatatgaacggagtgaaggtcagtgagcgatgagaccgggctggacatgtgacactgatcacatgactatatcaactggcccctccctgtcccacttttctcttctcttccctccaaccacaatcaccactcgtatacaatatacatcctggctagtccatcacgatatttttaattaatttggggatgaggaacgctggactctcgttcgaatagaggacagaggatttaccctcactggtaaagcttttccgtcatgctttcatacccctggttcagcgacatctcaaactcagacctaggacttggaccagatgcagtctcgaactggaagcgcaaacaactacacaccgaattgaattgtctcctagagcatggaccgaaatgggcataaatgcatcctctccatataaggtcaccgggttacgactggcccgtataattcaaaaagcgaggaagaaggaatgagcgcgtgacaggaagcggttcgtaacatttttggcaagaaagggacagagaccaatgggaacaggcaattgtggctggcgaagttgccaggccagcggcatggacaccgagcgagtgaaaaagcctatgaccaatccggatcaggaggagacaggggaaaaagctatgtctactgggtagatgctttatggcctcatcatcttgtcgcgactaaaccaacgaatgcccccatggaccttgccctttattgcctactctgagggattccgagaaaaatcctccgataatgacctgatgcctgaatcagccagagaatacgaaacaagctggatgattgggctactccgagaagcagatgctcgacgttggaccgaggaacggcatatacctccaccacgagaaatccatcatacgctccgggcagattttcactatcacaaccgacaagtctgcgttcatatctgaacctaagactggtaattttatcaggtgccactgtgggcatccagccgtgatatttgtgatcatccctggttatctgtttagtagtcatgagaaatcaagtctaatgaacacgtcaacgggtcaaagagtaatttatatggcttgtatattgaatagagtaattatcaagcctagaaaaaaaacaagtaagctatgtcgagtgacagattttcttgcatgtttcttgaaacatcctcgtattccatattggccgtgtgacttttatgtgctgatcggccgatgagagctctcggttggactctagacgaagacagatatgatttgccttagaaaagacaaagaatcagggtgacctccagagaaaagacgcaatgatctgcacaagatgtgacagtgccgaccctggatttttgggaaagggacgcgtgaaggcgaagaacgtagtaacaacgtatagaacttgggcaggtcttgttctacagtcgacatattttcggccttcaggttaaaagaagaggactcccataatcgtacatatgacttgatcccttttgattctttgctaggtgactcttatgcaagacagatctattaccatattgcgacttacagcgagaatcagttcaaaagccaaagcctcggctagctagaccacgcgaggacatggaatgaccaaataccgatctgtctatatgctgcaagcaagtagctgcccgcttagtccaagcccgaaccatttgaataggtgcattgcccaaattcgagccgtgataccaaaagattactaggacgaacaggtattacaaatatctgaacaggtagcgaagcagaacccaagaaccaatgatctcgacaagttcccaggacagacaagaatctcatctccgacaaatgcaagcccaaaaccgaacgtgtcgcatcttgcgacgtgggtgccacccgactcccgcttgtgtcgtgcaacggaaagctgcagacgaaaaagaaagaagggaaaaaacaaagagagaaaaacttcgctcaattccccgagaaaatcccccggttccggggcattcaacatctccacaaatcatgcggtgttggtctgattcgaaatctcaaggcgcagcttcgggcgcatgcagaagacaaaggcgagaccagtggacgggaacttgcagttttgcgtggtcaagtcaagaaaatgcggtcagcattttcgtcctgagatatcactgcatataatcgaagcctcgtgtacggtcagatatcttcctttataatggacccggggtgttgatttgccgcagacattgaagatcgatatgttccaaggttgaaggaccgaccggctcatgctttggggctagaccgatgtgaaaaaccaacatgaaggtggggttgggtgttgggaagatgcctgtcggactgcgtcgacatcgagagcgaaagaccgatcgcactacccaagaccacgttgctcttcccggaagcagggccctgaacccgtagagcgaatattatcgcttatattcaggggctgtgacacgttgtgtcctttgatgctaactcatcatcggccttcggatttaaacgtgcgatgtgacaacgtacttttgagacatgtcagatcgagccccgaactccgagctccgagtttcaagataacaagtccctggaagaatgggatatgacttgaatggagaacaataccaagctgatgtcgagataaatgtgaaaggaaacaaatatcgaagacaaaggaaaaaagagggggttagagtaccctggtctcaactgccgtctgtcattggactcggacaacgcacaaacaaaggcagcaaattagagcggatggcgtcacaaagataaaaacaaccttccttctcgacattccaagatatctagggcgccctttcttgaccttttttccaagacaatcccacaatcgatacaatgacaggcgagacagagccactattgggcgcacacgcgatcaaaccagcccagcatccaaagaaactactggtgtccatcgtgtgcgctgtattcttgatatgcgccgatttcggattcttcatgtccaccgcgccgcagattgcagtgtatgaagatatcatctgtcgaaactaccaggacactcttcatagggcgggaaatgagactctgagttcgccagtgtccaatccgtgtaaatcagaggcggtacagggagaattggcgctcgtgatcgggtaccaaagtacatttgatgtgatgcctggtaggtatcttccacgatatactggacttggggatcctgatgcctgaaatacaggtcttatactctcgctgccatatggcgtgctgtcggatcgttgggggcggaagcctctcttgtatcttggcatactaggcattcttctcggagagatctgggttaggatagtttgtaagttgtttgaacttgttactcgataatttcctgatcacttcatcttaggtctgtggtcaagtgtcattcccctccggatggtctggttatcagccgtgtttaaaatcatcggcggcggcgaccaagtcctcacggctattgccatggtcatagtggctgatgtcttctccgacgatgagaggtactgttatggcccgattcattgtgataaagctaacaaatatacagagctactgcgctcttccgtttacaatcttgtatccaaatcgcagagattctggccactccccttagtgcttatctgatgaccttcggtccaatgttcccctttatcctatccctatgcatcatcaccgtgggaagtatcccacccttcttcctgcccgagactctcagaaacgcaaaaggaaagcaaatcagcagagaaggtctagaacaggacagcgaaagcgagcagccccagcccccgaggaagacggcgttgcaggagctcacccgacaagtgcgcgagttcgcacagtcgacacgcttcatttgggccgattccaatgtctgtctaatgatctttgtgatgttcgtcacagtgatgagtcgacagtgcaccaatctgcttctgcaatatgtgtcaaagaagtttgactggagtattagtcgtgtacgtgcctgtccctccggtcgaaccaaaaactaaccatgctataggccagtctcttgatctcattgcgcgggatattttccctcgtgacctatttggtcataatgccaatcctcgccattttagccgccaaacacctgaatctccgtggaaatcgtagcgaccatttcctgagcaaaggcagcggcgtgctttcaatcattggatttgctattatctccatagctcctacacccgctatcttggtaggtggtcaggtcgtcttgtcaatcggatcatcatttatggtcaccacacgcagtctggctacttcactcgtacaaccagaccatgtcggcaccttgtattcggcaattgccattgcacagggcgcaggaaccctcctttccggtccactatttgccaacctcttccggttaggcatgcatcttggacctgattggatgggactgccgttcttccaagcctctctctttttcgttgtggctgtcaccgccgtttggcacattcgacttggaccatctccgcgaaccaatgacgaggaacaggaacctttgttgtcgtacttctaatatttcttcagtcaatttcattatatccaagcaattcaacacggatcccttcatgtggagagttatcgctgaaccaggcgaattgggtgattgagcctccatcaatgagcatcggaatcacacagatgatcgacaaggccgacagttgtaaacctaagtacaccatccaagctatcgaagcagccctcggcgacgtcgatgacccgttaatcgcgatatcccgcactacatctaaagaatacagcagaatttcatttattaatagaccactttgaacgaaactgtagaagaataaatacgcatagtctgctcagtttccatcatccgatctatttcatacttttgaataaacatgatcattcgaccctagggtaacaataatcttcatggggtactccgtagtgacaacagagtttggttggcaaaatataccatcaaggtataatctcaagaggtaggaggacacgcagcatgccagtcgggacatggaaactggcgcatacagcttgacgacgtcatttgcggtcgattcggggcctaagtcctactcggtatgtccgcggcactggtttgctgccgtaggtcccgacccatcatgggtctggtttgctttcgcgggtgttccagcaagacccgtatcctgacatttcgttctcttgtcatgatgtcctgactcatcattggtctggtcttcgcttctgacttgttctggcctgcggtcgatatacatcacgtagagagacttgggcggaggaaagccgaacatcgttgaagtacagctgtcctaaccggacgaaaaaagggcatgaggccaatcaaaacatatatgctcttcgtataccatggacctaataacgcgctgcctggtatcgatatgatatgtaatatgtaatagaaattttcatatgttaagcccgttctagacaatttagtgcattctcttgacgttgtatgcgaccagagattatgagcctgatggccttgagtagaatcaatgacggtttatacggcgggtcattgataagcagacatttccgaggcggcttttgttttagtacatcgatagatggccatagagacagccttctgttaaatcctcttctactggataagctattgctagaatcgtaatcaaggatagccaagagagagacgccatattagggttacgacagaatatccattatgcttagagtgattaatttctgaaactgcatgaatttatgacaattctgaacagaaaaaatttgaaagtctaaggttctaaggttctggaattatgggtgtgtattacaaaaatatccccttccttttattggaaatgttgtttcaaaatagcaagcgctttgatttgatactgtcagcaactgttgaacacttgctcttaaaatgctaagagcgctcagaaattttactatatatcgacatggcagacctagattatctttatcaataatatgtcgaggtaagaagggaaaggggtttggtacaaaggcagctgctttcagtttctgattgttcaaataggtgcatccattacacaggaggagcttttcgcttatactaatggccattttcttactaacgaataataccagctaaacagaagatatgtccggtttgatgtggataagctttgtaatactactgtaacagtcggcggaaagtctagttaggtcacagctattgacaaaatggaaggaggtttcagtaaggcttttttgataagaaaggaaaatggatccgaagtgatagcaaaaattctatgccacattgctggcccgcctaccttaacgacagctggtgaagtcggcgctctcgaatacagtacgttatattggtataattctacttccagtggctaatatcctataaaatagtcagaaaacacactagcatccctgtccctcgtattcttgcctagtcttcgaataactcgaatgctgtcggtacagaatatatcatcatggagaaagccgccggtgttctactgtttcaggttttcgtgtgtgcttgatacaactctttcagaattggtcggaccttggattttctggagaatgccctttatcctttacgtaggagcaggtcgatacgcacgatcgctaattctctgagtatcaagcttggtataagattcaggctcttgcgtaagaatgccttgacactgatgcggaaggatgggttgtaccaggattggatatgaatgagaagaggacgcagaataaggaattgttgactatgtacattgaaagcgttgctagggagaaatctgtagaagaggcgagagccatatagcctttcccggtcaaggcaggagtatgatttgagaattttattatactagattgacagataaatagaaagaattctggaggctgtcatgatattttttacctccataggaaaaccggaggaccagctgacttaggccatggtaaataacgactgccgtccctctcaaccaccaactaccttaactttataccgcacaaaacctggagctaatgtatgaaaccgggtctatgtatatctcctgaatgaaaataagggaaacgggtttagattatacttagatcttcgtagacagggcagtcctccgtatggaaagtactcttggtcactttcaatacatttttatctaagtgaaggcggtttatagatgattgcctggggatttaagactcttctgggtcctcgcgggctgcaatctagttagcgcaaggatagacggtaagtcaacggttacaccctcgtctgctggcacaagaaagcttccatcgattaaattctcccagaactctgatgtagccattatctcagtatcggtaacagaaccaggctgctccacctcatcatagccacaatcctcgtcaacgtgaatcacgatatggttagatgccgagtccaaaggagcaggatcatctctaatcactatgggattggtctctgtgtctgactcaggagaatcgatgaattcgcatatgaccacagcaggtcactctgaaggttcagctgggattgatgttaagatcgcttcttcccaggttctgcaaattacctggtcgttccctttgcattgtgtcgtctgaatttaagaggtggatcttgattcaaagagtgggagcactccaagaggagatggtatcaaggtctttgtaatttggagagctgtggtcggccatcgatttgttggaaagggggagtcatacctctacacaagtgctagctcattcccgaatcagttttctatacagtaacgccgcagaatccctgccactggtttcgaagtactaatttattttagccaggggcgcttgttatgagtcatgcgacgttaaaaacatgattccgatgcattatgccatagtccagggatctgaagagaccatcgaagctttgattcaagcaggagcatgtgtagacgctggcaccgtgaggaagagatggacacgaattgaaaaatctggcagatggaattaccatctttcacctggagaccaaaaagcctcgggaacccggacttctcatggcttaactccacttcattgggcagcactcattggccacccggcaatgatcaaatatcttctttccaaaggagcagatcccaacaagtgttatcaggacggcgacactccgttgcaccttgccatccgagcagatatcattcgtgataacaatgatgcttggaattcatcttcgtggcgaattgaaatctacaatgatttagttgaggctggaagtgaagaggctgacgatgcgcgtcaccacgtatccgaaattcgctcggctgtaatcgaagttcttctctcgcatcctagcatagacgtcgatcttcagaacgagcaactgcaaactccattgcacctggttgcatgttgcaaagatttctcgatggtttctttttcaagattgatgatcaagaaacccgataactcaatttgcaactacaaaggacaaactccattacatcttgccagtggcgcagggaaagctagaatggttaaacatcttctcgctgcaagagcctcagttgatgttctagattccgaaggatcaagtccccttcaatacagtgttcgctctggaaagtctgctgcggctgttgtcaaactcttactaaaatgctatgacatgactcagttgaattcatgtactcaaaaagatggggcaggcaaaaatttgttacatcactatcttcaaacagacgctccctcccaaaagctaattctcacgttgttgaatcatggcgcgaatgtgaatgaaatcgacacagaaggcaattccccactcagcctttgtctgcgcacgtctaatttgatatttaaacgagcctcgatctgtcgcttcctattgaaaaatggcgcttccattttgtggactgatgaatcagggagaaatttggctcatgtatcgatgcttgcttatccttggatgccggttgatggagttctctcgaccctgtcagagttcgggatcgatatggcagcgaaagatccaaataatcggggcatacttcatcacggagccatgtatgggtcggtaacccaaggagttgttgaccttctacgagggagcgggtcacttagcctacatgatcgggacaatgatggtagaacccctctttcatacgcagaggctaagctgcatccgaatcggggattctcacggaacagacgggaattgactctcgatgttctattgaaggcggccaatggagactgaggaggatcctggccgatttcaatccacttgctacttttcaacgcccgtgcagttttatggctttctatagattggttgccatgtcgcccatgggactgcaacgagcttagtctatgtcgccgttgccgaaaaagtatttgatgttctcacggaaactgcgtatgaaatatccggcctcataactctcctttaaccgattacgccttgttcagcctgcagggtgaggcgggtttcacattcaaacgaggctgtctgccaatagttttcatatcagatacacagagcaaggtaccgcacaaatgactagcctgcccatcaacttgattcataaccacaccacaacgatgctgctattcctacggagctgtatgttgttatctacggccagtatcatcaccactggatcaattgagctctgctagccagtctttccatgtctcgagataaaagacaaaacgcgcaagactggccagcacggaggcacacaccctgcacatgtccagtccacacaacttgttcctagcccttgtctgtctcatccttttatgaatattgatcatggaaacaacggggactacggtcacaagcgccttgatgataaggccgggacgcgtaggtatccgggatcggttgcgcgatagactagtgtaaaatcgagggagctggatatttccgcgcgaatcaaggcgccacctcacagctttacagatccgaaggccgtttggaggtatcgacatgaccgccgtgaactattgcggtcatcgtcaaaataaaactgcctgtgttagtcgcatcaattgcgcttactgagcaagtaccggctcacgcgaatcgcagctaagccagtctgatcaatcaattgagccgagtaatccgagcccggtcatcttcggttccatattgaggctagcgcccttcagccaaggctgacgacaaggctctcgcgcggtgtcggccctagggcagattttcaggcccgctgcacagggacaaatattctgaaaacatgtagggcggatgcgcctgcatgcgcggaggccaaatataggtcggcggattgacacctgacgccatggtcgggcctgagaaggaaaacagggccggaggagggcagttcgaatcgttcgaattgcagacgcggggtcgcagaagagccgacgagtcacacacaggggaaagggggtggcggagctcaggagctcggtgatccggatcaatagcaaaaatgcctcatctgtgaggcgtaggggagaaagaaggcgaaaaacaaaatcggggctgttggatggagggggagagcaggggacctatatagtaccacgcacggggaggcataaggacaaagagcgctaaacctaaggggtcaagactaaacctaacggagcaattcgcagtccccatccgatatggtgtagtggctaacatcgccgtctctcacacggcagccgggggttcgattccccctatcggagtttgttttttatttttatttttttctttccttattgtatatagtatcagcatcatgctagtcacttattttgtatctggctttctcaaggaacaagaatgtcattggtggctgttccagcgcgggtggaatccatgagtcacacagcctcctaatggataccaagccacgatcgtattctgagtcattagcatcctcgagggctgatttggcctatcaccaggagttagacattatcacttcctgcgtactttacctacaggtatgactgaacgtggatcatcccagaattacatctccagccgtacagggctgagtcgcgactcgccaaggtgacatctagattaaaataaatgtgtttggcctatgcccttggggtgatatatataattcacctcggtttccaagttaaataattaaagtcaacttgaaaagcaaattgagaaccaactcgactatcagaatacttgaatcattgaaaaccatggcttcgaataatcagagcgatacagatgccgatatgattacggggcaagagacatcctcattcccagcagtgtcaacaagctcgcctcaaaagcgggatcagcgaagtgtttcgcctgaatataaccctaaggctggcgaaaacagactacgcccggctggaggtaggtagtttgaaacttgtatatatcgccaaccctgctaatcggactgcttacagacatcatcaatcgcattacctgggattcggcatttgaacgcagcaactatgtcatcggattcgtggaccgatttgaaggacaattggaagtcaccatgggcagttggaagaaggagaccaccgatgaagaattcattccacagcatcgggtgttatatatccgacacatcaatggggacattgtttgggatcgaaggagacgtattgacaagatctttttgagtggaaactcggcgttcaacgaattggcctttcttgtctaaagattgaagtgaattttccgtcgcaccttctgtttttcctgtcccttcctaccttggaaccttggaaggttgacttctgtcgtccgttgtctctgtcattttagaatatctccaacattcatcacctcatgctgaatgacacaatgggctcttctaagaagaagccgtctttacctcgcttgaccaccaacatccccctactacagaaaccaactaatgcatcatgcaatactttgctacccaagacccttccggatgccagtgtacccccgatcatcatgccagagaggccggcaagaacttcatcacttttcaaggaggacaagcacgatgaggaaaatatcgtgcccgtcacgcgttttgcgtcagagagcatgcctgtctatcttccccagaaaagtgtggacgattcgccggtaacaaagacgaagaaattgtactacgaagatgcatttacggctcgtggatcgcacaactcccccaaggaccgtgtgacccatgaatcggtggttgtcgttgagctcaagaccaacaccaaggtttgtaacgtgctgaaattcgctcgatgattcctctatgctaacccaccaactagccaaaggataacatatccaagttactgtcagatttcgcccacctccttgctcaggtctaccagcgcccggagacatcaatgctagtcaccatcgaccaaaacgctgacttgctttttggaactacctccggttctgcatatctcttgaaggttactgctctctcgagtttgatcggacccctcaccaacctccgtaacacgggcctaatccaatcaatcatccaggaaatgtttggaattgcgcctgacaaaggagtggtgatctatatgcccgcgagtgaagacaatattgcaacgaatgggacgaccgccaggagtgagatcgaccgcctcgaacgaattaattccagcaataactcttcgatcttcaagtctctctcgcgatccatgagtcgtcgcatgaaatcgagcagtggaaacagtattccgatttccctcacttcagttatgagtcctgacgttgcaacccctacttcaacttctcctatcgcttttgcttcagatcaggcccctccgctgaggtcaaaccaagcagacgacaaaaagccactacaatcaccaaatgcggaacggacccagcaggtctcatccaaggacgagaaacctgaacgagttttaaagaagagagagagcctgaagagttttgttaaccgtcgcttgggcgagttgggcgagctgactacaatgaaaccattcacaactacaaagggaaagaaggattgactgctgtttgagaatcgcaaagtacattgcagtggataatgtagttgattgcattggggtatcttcttaacagggtttcggcatatggcttcgctgtgtcagacaattcagtccatatgattataccttgcatccttggccaactcttagcacgaaattgagtgaactgacctcttgtcaatgtaatatgtatttctgtttcgcttttgcttcttgaattctaaggtttctatatatcatgttttttgtcaagttgttagagatactttgcccgtgagacggtggtagtttagacgatcatacatgcacctatttctctcttatgatatttccccttatactgtccttacttctttcaaccccttatagggagcataagaaaatcacagttcccttatttactttctcgtccacaacacaacatcacccaacacaatatcacccaacacaatatcacacaacgcgatatcatgtctgactcagatgaaaaccaggctacagcgattgaacgcgctgatagtgatgaatcgctgatcttgatgacctcgtctttgcctgctgtcatcagctttgtccaggaaacccccggaaacctcttcgacgcccccaacggcgctgctctgatccgtgggagccccttattagggaccctttatttcaattagagcctcactaacctagtcaattcagatgcgtgcaactgccagggtgtctggggtgcaggaattgcccgtgcatttcgtgatcgggttagtcaatcattcaatcacccacttgacaccatagtgtagagctaacaaggcgatgttttatagtatcctgccgcctatgatatctaccgcaaccattgcctcatttacaaaggccacccagttaccaacatcatcaccgacctacgcgatgaggacccgcagccctctttcgttgtggaccatcccctcggcaccgcgctcatcatcccaccccagcaaagtgatatcctcctacactgccggcgccattggattatctgcctttttacctcccagaaatatggcagccacgtggattcggaggatatgattgtcaataacacttttgctgccctacaagacctgagtgaacagctacaagtgctttcccgacaggctcccgagaccagtagtgagcgacctctgagtctctactctagccgtttctgcactggcttgttccgcgttccctggaaccgcattcttaacttgatcaacacggttggtctgaacatcaacgtataccacccctttgcgttcagcaaccgccgcgctcgccccgtttgtatggagcgtcccagagacagttaccaggactgagataatcaaaggatctgtttcctccccatcagcaaggattttggctggtgggtttctacctggtggtgtgttgtggaggagcgagggttaactcattctcattttatgatgacaattgaagctagctaccatggaccgagcacatgcagataactttgatacacgagaagaacaaaaaaactagctcaaaagaaaaaggagaatcaagcctgtcgccactagcaaagtatgttgtagggcctccccttatcacctgacagcgcgtactgtagatcgcgcccgcccgcgttgaggtgtctctcgatttccccaagctttaccctcaccatatacctacgattcccaccgtattacctatcgcataccttctgtgactctctaggataccaatatgcccggtgaaccaccagctcaaaagcgtccacgcctccccttcaaacctcccagtcgtacgaatagctccgcgccaaagcccaaaggaaaagcgaaacaaaccacaaaagcctccacgtctactaccgtgcccaaaacaacaaaaagcaaatccacaagcattgggaaacgcccccggcccgattctccggcagctaatgccaatgccaacgccgcctccgaatccgaatcagagtacgattccaatggatcgggccgcagtcgttcgcgctcgctctcccaggagcccgactatatccttgctgaaatcacaactgcgaaccaagcagaggacgtgacgtccagcgacccaaaaataccttcgaagctgctcacacgcctactgcatcagaatttccagaatgagaagaccaaggtcgcgaaagatgccaatagcgttgtcgctaagtatattgatgtctttgtgagagaagccattgcccgagctgcttatgagagggccgagtcagatggaaacactgggggcaggggtcttggggacggcttcctcgaggtaagtcttcgttttttaatctcccaattggctaccattggtatgctgattgatattctaggttgaagatctggagaaaatggcgccgcagcttacgatggatttctagcctctgcgtttctactaccaagggtcatggcgttaggcgaaatccatcatcaactagggcgtattatttattgttcaagataccacagcattggcagaatacatgccacatttctaatcaaacatcttcacacgcaagacgctcgcaagagtgaaatatccctcgggttcgtatactcaggtggctttccaacggtgtgatcctcaacaaaaggaggcactgccccgaagccattggcattgtgaaacagtgcaatatctctgttaaccctctttgataaccaggcgtttgccacataggccgtgttctttttgctgagatgaacaacagcaacggggagcttgttctgctcgggtagatggccgagcttggcgtcgtatgctgtgtggcagatgtcgaagacgaagaatacccgcgttcgccacttctgagctgccaccagctttgttgttgggtgaacttcttgtgggatgtagatatggctttctttgaggaggcggacggcttttggcaggagggcctctgggttgttttgggctttggatatctgagaactccggtgcgagactatgaccaggactcggagggggtttccctgggacatggtgagctgaagatgtgaggagtagtccctttgaagggttgcctggatgggtccttaccaagatagacgagacggaatgtttggatcgtctctacgccttttctgtttgtgttcctcccgtgagggtgcactgctacataccaggttttacagggtcctcgagcagagttaaagtaaaaaaaaaaaaaaaaacttcctacatccatgaggcatatggggggcaaagtcggcgtctcacctggactagatgataaccttccaatggcccgacggtggatctggtcgttcaaactagaacatttgccaggggatggtcatctgccactgagtacaaacatgctgacagttaaggaccagggtcttgcttcagctggatatcaacgctgtcgggtacctggtgactgggttgagaggtcgggatgggactcgggtcagtccgacatcaaattatgtacaacgtagcaagcccgaagtacgcatcggagatggtaaaacaaaagtcagagataagacaaaaaggtccattataatttgaacgcaagctggatgtcgccgagaatgttatagttgatagtggacagaaggcggtggctagtggattttcccccgcgcgtgttttgtttcttcaacgcgtcaagcccagcccgagaagaccaatcttttcgcgatggatgatgcaacgacctccttgctcactgagcactttagttacacacccttggtaagcctatcgagactgatacgcatggactcgtgctgcatgcgcgacctacgagttgcgactccggacccaccccttgcaactaggaatatcgctgacagctccctagtctcttatagatgacattatcaactcgatcaacaatctgatttaccaggcgatatctagcttggagtccggcctcctcaatacgccacctgaacggctcggtttctcccatgacagcagtggccccagcatcgcggaaacagacgaggatggcaatgtggtttatcccgaggcgaagctagagatcgagaatggattgcatcagctagagacgctgctggagaccaatgttgataaggccttcgacaaatttgagatctatgtgctgcgtaacattctcacggtgcccggagacttgctctcttgggtgcggttgaagcactacgaggtatgtggaggctttcacagttgtctagacctgaacctgcttgctgttttgtaataagggatatactaatgcgccttgtgctagggtctctctttcgtatcttcgccagacacaccgacgccagaaaccatacatgcgcaacgcaagaagttgttcgagacaaagaaactaaaccggtcgctaaaagaagaacgcgctcgaaatgatgcggtcatatcacagctacaatctatcttgtcgacagttgaaacagcgaaggtagatggtgtgtccaagacagcggaagacataccagtggatctgtccttcttgacctctagcccagctgcacgccagcttcgtgttggtgtcgatgctgggtcgaatgctaaacccacacctcttacaaccaacactactttcattctctcgcagctgcccgcgttgcagacgacacttgaacagctccgaccgaaattggcagccctgcccaatgcaacggtacaaattgaagccaagtctaagagagatgagagaaaggaatatatcgagagcagaattcgactccatctcgagcgagctggtcagcttgctgtgggtgatgatggaaatccagtggtcgcaggtcgcagaatcgacatcagagaggcccacgcccttgaaagcgtggcaaacatgcttacgcaagacaaatctgtgtaagagaatgtgcgtgtgaagaatgttttgttctacgattctattattgaatatgtacaggtcgccttattaagaccaggtgatgctccatgtttcctgggtctttctaaaggggactacgtcagtcttgtctgactggaggatctccaagatcttctcgcccttcttctcgatagtgatgaattccttctgctcctccgggaggccatagaaggaccgtccgaacttgctcatgaaaccctcgacaatttctggcgtgatctcatcctccctgaggactccgttatcgcaggcctgctcaaacgcatcaatcacaacctgagtggtgtatggttgggtgaagactccagcagcgatcttctcgccaccacgcttggatgccgccgggtgcggggcgctgtcggagccaaagaaaaacttgggatttcctgagacagcagcacggagaagggcatcgcggtcggctggggtcttagcaacgggcttgcagaagcagaatgggtcaccggcccacgagtcgatgataatggataggtgatgggctgtgatggtaccagaaacggtgggaccgcacatcttcacggcctccacagctgcagcagtggtacagtgctccaaaacgatgcgcagtttagggaacttggagtgcagctcaaagagcttggggaggaaacgctcttccgcggacaagaccgtcacatcgcctccggaggggctttctccgtgcaggttcagaatcatgttttgtcgctccatctcctcgaaaacaggatagaattgcgtgtagtcgaccacgcccgcagaggaattggttgtcacacctgccgggtaactcttgacaccgacgatgccgcgcttcttagcttcaacgatagtctccgaggtcacggtctcgtggaggtacaacgacataaggaagttaacattcggctcgatggcttggaggcgcttctggtagtccagagcacggtcgacggtcgtgataggtggcacaaggttgggctatcgagtgtattagatataactcaaaagctaggatttgtttcccaataaagaaacccccttaccataacaaaaacggtgttcacacctccctgtcggatagtaggagtcaccaactccatcattggaccatcacgaagatggactatctttggtcagcttgcatctattaatgcccagaatttcttagtaccatggaagtcggccgaggcggggagctttactccctgcagcttggagagagacatgataaattccaatcaagatcaagctcaagctccaatggcaaaggttatatccctgatatgttcaagaaaaagtcgatctgcgcttttgccccgccatttctgaaaaaattctgccgatggcggtggccctatttggccattctccagattcttggattcttggattcttgtttctttatttcttgatttctcagctgattctaagcttgaaaatacaccgaagagtcagaggcaatgtgtgaccataacatgccgaactaatttgaaagaatattccagtcttacctgcgcatcctctccgcacggactactcaccgtggcacgtccggagtgtactcaggaagaaacagggaaacattgatattcaaagaccaaggcctagatccgttcaaggaatacgagaattcctcgaatcaacaaggcaagggtgtgttcctgaatcaccgttgccgctggtggcccccaggcacaattctcggcgcttcgccgtcacctatcacaggccacgatgaccatccttgggagaaattagattttccaaaagacaaatgagatcggttcttcaactaaaaatcacaagaaaaccccgctcagactctatatttaggtctactaggcgctttgttggttgcttgtcccccgatgtgtctgccaagtcgccgagtctgcaccctggcgctcaggcaattatactccggggatgtacaggtccagttgcaaggccaatgtttaaaattctagacagtcctgcaaattcaacctagagcctaaggcgaatcagcgcggtctattaccatcgaggcgccctacatggcgctatgcagtaatcgggctgaagatctttgggataagccctcattcggtggttactctcttgtgacagcaatagcgctcgctaagatagtccctggatcaagtttaggctattttccacgaatatacatatcccgcctggtatccgtcaataatctgagtcctgattgattgtatccgaaaagggtgtatgctgggaaaacaaccaaaggaatccgagcaggagacaacgcctctccccggagatttcagaaccaccaagtcatctcgagcagtatcctggggatggaatagggctgggaaactcggactgatgccctttatccggcactaatcaactggtcgggccatatccgcattatgacccacctaaatgggcctgatggaccgttgagtcaggagccgtcatatagttcaaagcgtccaatgcattgccactccagtttggctcgtcaaaagtgtcggtcaaatcacagatcggaacgtcatcgttcaccacatgagcggtttccgctaagccttgcgcaactggtagtgaggaaagtaatgtttgcaaagcttcaatggcctgaagcctccccgggcttgagttgctcgagaacactccattgtcaagatggagattcctttcgaaatcatgcccatgctagtatcaagcactggggacccatctggcttgaacgtgcgatatttgggttgagaatatatgcaaatctggatgaccagcatggatgtaagttcattatgcacggggggcctacctgtcgaacaataggccaaataagttctcttgaggaaatctggactctgtccatgaatttggcgtgtggcattggcaacatattcatcgatgctcaagatcataagcaatgtcaatgtacaacatactcagtagcggagtaatcaatggcaccgtgaccacttggatcatcttcatcaatcccgtatatctgtgatgagttggtttcgcacacgggacagaatgctgcccatttctggatacccacagcaattgtgccctaagcgacacagcatcagcttccagataataccattctagagggctaagcgttctggttcgtcagggttgtgggcgatcagcgggtttaatctcgcggggttgaatcaacagtcggagatccgaaggagtaacccggtcgatgcaacctcagaagacgtttcgtcaggcttcttcagacgaaaaccgtcggagtctgctttagcgctctaatgcgtggtgcatttctgtctagtcattggagaaaagggagaaaagcccacaattcgacttgccccgctcggtgatcgtcgcctacttcgactagcactactgtgcttcatattattttcaccgtgatgataggtgtagcggcgacatccgagaacaaatcagcgtcttcttatcggtacatgtgctaaattgactatgtgcctgacgatgtttatgccaagtatggtccctggactgaagcataaaaaccgtccgatgaccctcctacatctcttcagtcagctcagcaattcactctcaattcaatcttgacaaaatgttccaatctcaatccgcaaagggcatgttcgccctagcagctatgagcctgatcagcggcacaaccgccagcctcgaaacctgtgccagcagcaccgccttcagctgcgcgagctcctccacatcgccaacatgctgcttcaactacccaggcggtgccctcctccagactcaattctgggatactagcccatcaaccggtccctccaactcatggaccatccacggactgtggtacgtagataccgttatgaatacctgaaatcataaactaacccctccccatccaggcctgacaactgtgacggcacataccaggccagctgcgactccaaacgtgcttatacaaacatcacagcgatcctgcaagaccaggatctcggtgacctggtcgactacatggacgactactgggttgatatcaacggggccaacgaggacttttggtcgcatgagtggagcaagcacggtacttgcatcaatacaattgaaccgagctgctactccggctacaaggcgcaggaagaagtgggtgatttcttccagagaacggtcgatctgttcaagaccttggatacgtacaaggtatgtcccctctctgcctttcattatatatgctgttcgtttctgactgtgtgccaggctctctctgctgctggcattaccccgagtacatccaagacctacactctcagcgccatccagaaggctcttactaccctgcatggtgcgtcggtttaccttggctgctccagtggcaagttgaacgaggtttggtatttctataatgtcaagggcaatgctattgacggaacatacaaggctgtcgatacgcgtaagttttatcatttgcttcttggttggtgctttactgacgtcttggtcattctagtcactacttctagctgcccaacgactggcatcaagtatgtgcccaagtaattaaggaacagggcttgatgtgttctgttggtgattgtccttgctgagttgcacactgaaagtgttgctaaatggtatctctggattattgctatacatgttgatatagattcgaattctcgttagtctcatatgatgatcgttttgcttgacgataaagtctcactgggtatagatgtagaccggtgcttatacggcattgaccacgtggtcacactcaggcgcgaagctttgaggcaagaatgtcgtaaatgcatcctggccctgtagtggacataaagcacaccgtagtattgggaatcggcgaggtggcgggaggtcgagaggtcgccctttcaatcggagtcgagtgagccattgctcaaagtagaggtacccgccgagttttatcatcgcaacgaaacatagcttgcacaagtcttgcagagatttctgcaataacacaactatgtatgaagccatacacttgttgcagcacgcgacaggaggaagagtgtgtttgaagccagaaggggtttgggcagagagcgcacgagtggtgttttcatatacccttgagccgtgcagcccgccgttcgtcttccctcttgtcttccacgcgacccaagaaatccatgcgaccaatataaccttccttagctttgctatgtgtgcgcagctcgtctttgataccggccgagtcgacgtacgaggcccagtcgagtcttgacttctccacggtgttgatcttgggtccgcgcgcatctttgtcatcggtaacgagttgcttttcccagcttttcttaatcgtgccggtcggattggggtcaaatcgcgatatcttgcgaagcggtcgccgaaggttacgagcggcatttgcggctgcagcatcctcgtcggtatattcgacattctccccactggacaaaaacgctttagcctccgccgagtgtttgggcacgactttctcctcggtgatccattcgccggcaaatttgtaggtgcgcttgatcttgatcatctggtcggcgtgcacggtatggcctattttgtgctccgcatcttcggcaccctggtcctgtcctttggtttcgcctgttggttcaggttcttggtcggattcggatatctgctgggtctggggtggctgcaagccggtgtgggtctggggggcattcatctgctcccatagagcgtccacgtccacggtcgcgccgtcgatcctggccagcggtttgcgctgttcctcctgtctgctcgtagaacgcgtattagaacccaatattaagtcaagcagcattgataataacttaggacttacatgtgttgtttcattgcgcgtgtccgcacgaatcccccggttcctccttcattgtcgtccaagtcaatgtcgccatcgtcttcgtcgctatcgcgcgcgtgttttcccttggccttcttccccttggccttcttatctttcttctcccttgcttttctaattgtagcctcatctccagagtcgagttctgcatccttggggatctgagattgggtgtctgtctttcgcttcttctttactggttctgcggcttcatcggggtcggaagataagtcggagtcgtccggtgccgcgtctaagtggaagtcttcatcctcggcggagtcatagtcctcctcatcaagatccagattttctggcaaagtagcatttgccattgtcaatcttttctgcttgactgggcttatcgagaggtgatccagatctttaggacaaggcgcaacaaggtagaaggatgaatttctgccgtaggcggtgtcgcagctatgtatgtcatctccgttgactccattgacaataagtatgtacatcttctatgcacatccatgaacatctagacagacctctagctttcagaggcacctgtcaccatcatttatttttacaaccaaagctctatagcagtcgggaaaagcataagcccctccacagtaatggcagtcccaatgtcgaaacattgaatgcatacaggcctacacatgtggatgtataaatgagttaaaagacttggtaattgattcaatggttcatgatcagtagaagagataacaattcacgttctgatagaagaacagcgaagaagaaaagcctccccaaaacggactgcaagagtgcaaggaacagaccgtccgacgggctattcctcttgggccaaagccagaaacagattcatcttgtcatccagattcagccgcaaagggccatcgtactgagatcgcacggatttaaggtgcattggggtctataatacatatgatggttagtattatcctagtatcgtgatcggaaggcatgatgagaaagtaggaatggagggatggccatcaataaacaactgttcttaccttcgatctcctccagaccagtctggggtgcggcccaccaattggattcagcattaacaacaggctcggggaccacttcacgggccacgaggttctgctggttggcatcgcccgctgcagtgccgtggacagcgtgaccacggtgaacaccacggtgagcagcacggttagcagcacggtaagtaccacggtgagcaccacggtgagcaacacggtaggtatcacggtaggtatcacggtaagtaccacggctacggccacggccactgccaccacgatcataacggctgcctcgcacacggagagggccaccttggcctcgaacccgggccaactgttctccacgggccgcctgatctccattggcggcgccatggagggcaccgaactcatgctgtataggtcatgcacgtcagccatcatgcactgctaccatcccaaagaagaattgtgtgtatgagaaatgggggaatggggtgaatcttacaaccatctgggcttgaactgccagcagggtgagctcggtaacacgggcgtcacgagcagccgagggccgcataccttcctgctataagtgatattagctcagaacctcgaagctcgggctgaatggcaattggggtcatatcgtacatcaacttggcgttgaatggcctgcgacattagctccatgatgcggttggcaaggaaagtaggggcagtgggagcaataggctatgaataatctcagtattgctctacaaaggttccagtagtcaatggagcgttcaatcggcttacattgcgccgggagcgccagtcatcctgccgacggcgctgggcggtgctgccgccagggccggcagggccggtaggagggacagcctgctccttcattgtcacacaaagacagcagagacaaaggaataaagaaagagatgagtctgctcgctgtgtttattcacagcggatgaaaaggtgtgttgtgaagagaaagggaagttcagcgtttacgtttacgtggagctggacgtggacggagttttcacgacaatacgtgctcatatttacgttttatgaccaagatattgctcggcgtctttgctcggcgtcttttttgattgaaacctggagctcccctctagcttgcggctaatgaatgacttactagtttcctgccagacaaaatccctaatcggcatgatggacaacaaagagtgttgaatcggtgccttctgactctatctagggttagttgattccggctttgaacacatactctctatggctaggtatattctggccaaaagcattgagggatgttggtggcgaagccgtcgggagaaagaccatgctttgatttcctatggaagataaaggtctatctgaccagaagaaagacctagaagcaaataagaaaggcagccatgcctctagcagcagctattgtcactaatagctagagtatacaacgagaacaaggattgtgaagtctctttggtgatggatggggtttgaaagatggcaagtatgaggactcctggctttttatcttcctctatgagcatactgcttgtggatatgatgacctcggcaactctgctagtatgcatggagtatggatggatatatggtggagtcggcctataagcagccgcgttgcttgtagtaatggtaactgcacatttccgttgatttcatataatcaattatatatgtacttaacgaagatagaccaagcactcctatggccttcaaggcgaaatgagacatggctgggttgttgtacgtacgacgactcgggcttttttagtctgaggtcattatgttgatctagcttcagcaggtacgatttatatcgaccttgtgatataaaaaggcgcgaagtagttggatttctattatctttctgctatggtagactacatacagggatgtctttgacagatatcatggcgtatcttctaagtatagaaacggagaagatatcgacgagggatatttggggaacttatttgcataatgtgattgtactgaacatttaaaggttcctaatgcggctctggccattcatcattggccaacgcaagcagaggattcgactcgggaatgtaacccagatctctggaatgcgacatccgaggaagttatgatgccggggaagaacatcatattatcacctcccatggtacctcgcaaacttttctggatcagaaaaccgctttaggcgaaattgtcctcttctggttcgatcttttatcttcaaccaaacttgttgtctagatgttataccaatccggcacacgcaaagagccaacctttctggcttgacttagtcactgttcctctttaatcttcgtagctttcttgatcataattgcgcagaaaatatggtgcctggttaagaatgtgggccctggtatacttttccacgtgcgagctttgtacaggctcgtgtcagcgtgccgggaatagacacggccttgagagagcatttaatggttccattgccttgaagatggatgtaacgttcaaaatcctggtttccacgcgcccaatataaggtcttaagtgaatctgcttgaacttgaacttgaaatttaagtttcaacctctgatctatacctaccagggtgcatattattcaatataaatttgttcaatatcccaatgcattcttttactactcatctctcccttctatttgctgcatcggctacccttatcgccgctcaagatgccacatcccaaagcacaagcggcaactcgaactgtgcttctcaaaagtaagctcataagcctatgaaattctgttgagattcctttctcataatcaacagagttgtagattcatgcgttgcgataatgaaacgtggactcgcaaagtgtgcctcgaatgattgggactgcaagtgctcgggggctgcaaacattgccaagtaagtaggccacctacttgactctcgtaattcctcaatgagatgtctatacactcaacaccgcagtactgatataatcgagcagctgttacgtagattgctccgatgatgacccggattcgttcgcggccaaacaactgagtgtaaatgattgcgctaccgcaaatgcatacgaccaaggagagactaccgtcgcaccctcgtggactcttcctggatcaaatgcggcacagccaaccgacacagatgctactttgaccactagtagcagctcgtctactactgccggaccgactaaaacctttgcgaatgagaagtcgacgagtccatcagagggagctgcggttgtgaatgatgctggtagttggatggctcttgtggttctagggctaggggctgcattttgagactggggtgtcagaaggaagtgattaccgagtttacgtgattattagacctaattagatatacttgtaggattgcattgacattggaatattcattctgcgatataaataatggagatggcatatgtggagcaaacaacctccttgagacttagactagatacatattcgccctacaccttggttgcaagactaacccttctcacaaaataacagaagccacagaagtaccagaccagtgaattctcacctttcattaatcaatgcccagcatagataaccatgagtacatcccttcctttcaacagagtaaccattataaatcaacgaagcaatgtcacgcttacacagcgcttatatcctcccggagtcattctctcatcaattgcgatacacctgcttagtagcaatctccaacttctcgagttggaactgctctgcccgatgacgagagatatcccgttggaaccacgtaccaacagcagcaacgaggcccatcagcacctccattccaacaagtacgcacagcagcacaaagccagcacgagtattgatacagtcacgatcgaagtggcggggtgtattaatgctgctcgtcccgtttttccacttgcaggtccagctgtggagggtttccttcttgttgaaccctgctgggtaatcggaggacggcgggtatattatgaacagtatgccggccagggcagttacaaaacctgcaacggctgaagctgaggcatagttgttaagtgacttgataccagaatgcggctggatgagagttagtatatggaatcaaacacagtgcagtggaagggtgtaaaactcacagatggtaggagggtaagggcgatgtacaccaagttcaagatggtgattatacagccacatgaaatggcggcggttgttggacgaagatcaaagttcaaaggccacagtgcgaggccggcactcgcccactgggaggtgttcttataatgtcgcaagggtggggcttcgcacgcgacgacggcaatagcaacgccgaagattgaaaaggatagaccaagtcgtgcaaagtaaaggacacgattgcgtttgaggaattttgattcctccatgtatgaagaatgagcaccgcctgatccgtctagggacgagtttgagatcatgatgagagtgtcgttgggtttcgtgagatgataaagaggggtcgaaggagaggaagtgtgtgtaactgtcaatgattaccttgctggcaaggatccttctggtaattgatatgaaagaacgaagaaaccctcgggacaatgatggaaaagtggaaaaagcaaaggtaggtactattttcaaacaactgtctcggaagcctcgtttcactatcggactgggccaaacacttctgttgtggtggtcacgtgtcgatcacatgctaatgcctgggctatcaggcttcacatggctaattaactagctagatctcgatcattatagataatctaaccttcttcatctctctctcgctccaagaactttctagccatcgataccgtcaacactgaaggtgccgaggctatacacgtgacgctgtttacttagtactgcagtggggtttccgaccagagcaggatgaccaatcggtcatgtgatcactaaaagcactctcggcaacgcagacacccagcgacgactctgctctcacacctgtttcgcaggcagggctgtcggagctcctgtcccccgtggcagggtcccctcttcagtatatatatttatgatcaaggaacccgctgaccgggtctacttattcggttcccggaataacatggaccctggggatgtcccgacgtttctcccagagctaacccaggtcgaggaaatgctggtatctagggtacataccattattgaagtcagacaggtacgtggccagcaatacttttatcgcggccacgtggctcatttcctgaccaatgtacccgtttcctaaagatctttttctccgtctttcgctgcccagatcgcaagaaaaatggcggaggcgtttccaagtccgcgtaagcgacgccgcctcctccaggagtcggaggttaatgaaggggatatggaaattgaacactacgtccatcgaactgatccatttcgaagcattagcttcccgaatcccgatccgacagcccttaacgtcaccaccatgaccgctgaggaagatcctacacaacatttgcaccgtggcatcttcaacaccctcgaccagtatggtctgccagcgaagtcactttttcatatgttgaatgcaactatccccggtgccagctttcctctgcttcgcgttgttgttgcgagtgatcattcggctctagtacccctggggtccatcaaagacaatcttactacccttctcgacaaccatagccttccacagatttaggtggaggtgatcaacggggaccacttttatatccctactttgttcccgatccactcaacagccgagctttccattgcgtttcaccatcttaaggatgagatcgtccggcttctcgacgagactcttggaaccaaatggcaactggtttgtccattcaacattggcagggattcccgttccgcgcggccagcccttggtgttggtgttctaccctcaacaaatgcaaactggtatcagcttcaagcccacctgacgcatcgacttacatcacacatccgtcctatttttacagacatcgagttcctccctgggaaactcagcctccttggggagggtgatcctgtctcatttaaagatcgcgtcaaaggtcctaaggatattcagatgggatgttcaatcggcgttcgaggaggtaataacgctagtaccttaggaggctttgtcgcggttacatatgacggcgaaacgcaccgtggcctcctgaccaactaccttgttatgcgcccctcccccccatatgctaaccttgatacaatcaatcgtgagggcgtatctcctctctcgcctatccccttccagggggcaatcagtatagaatctctagccaggatagaccgtgactataccctgaccgatcttgacgaccaactacaagccctggagacacagaaggctcgggtcgtagacttcatccggcaacggcagctcactagcgatgcacctcgcgcatcctcccaacaacagcttgaagccgttgaaacctgggagaaaactctgattgcaacgcgcccagtcatccaggcgatgccacacgtcctaggtgacgtccattctgcgtcgggcctcttagtccatggccgacgtgttattgattgggctttcgtcgagctaaccccggaggccgaggagcgcttctttaggcccaaccgaatgcccgaagtcccaaggaaccagatgcctcgaagcggcccctccggtccacctccggctctagtcgcagcaggcacccgtctcgacgaatttagctcgttacaggaagacacgtactatatcaaacaagggcgcaccaccgacgtcacaggtgtagtgtgcaacggtgtgctgtctgtttgcaaatgggcgacacgatacgatatcaatggtaataccgtcgacagcaaagatcttcgtacggaggaattcatgataataggtatccaagatcgctttattgagtttggtgactctggctcatttgtcgtggattcgaccggggccgttgcgggcctcgtattcgccgaattcaaacacaacctccaggctgtcggactcgcattaacagtcccggatcttatggacacgatggagggtcgacttaaaggtcccgtctctctccgtctcccataatttccttgcttccatctgttttcattgccggaaacgtatttacgcaagagtagatcgcttcaacatcggctatgatctacgaatctcaacagagatagtgactggttcttcggaaccatggatgtttttttccaaccgacaatgatattattcttaatctgtctgtctttatgtggtttgaagcggtctgcctatggtcgtccttcgtggatcacagcgtgattctagtctatctgctcatcttcctatcctccgagtttgctgcctcctgattgtcttcgcgacggattatactggctacgcatgcctcttttatgagaatattctgctttgcttcatttgctaatggaaattgctctaaattcattgcgacctaataatcttgaaaatcgagtaaatatccccgaatgcatgtatgcacacgatcgctgtccccccgccgtagtagtaaatatggtgtattatgcatatgtagagctaggttctatcgcgcgtaatcatcacgcaactatatagacgcagactaagaaaaagatagaagcaatagcgttacagctagtctcaagttcctttggacattgatttcttgccgtggcgacgggctacttgcatattaagatactgctggcacagcgctacagccgtattaggcaagggctctcttagcacttgattttcaatacgaatgccattttctatggtaatcggaaggggatacagctaggttcagaattgactatgttggtttagtgctcttcatccgtgtccgtttccgtgtctgtggagatacaacctcgaactcagcaagtccgatcgatccctcagagcaggaagcaaatcttaatggtacaccatgttggcatcggaagatctagcgacattcatggcgatatctgaaatagcccgagcacactgatcaacaggcaatcaactcagccgctcattaagttcctgcaatgcgcccgttgtcaatgcacttcgaaacgtaagtgcaacagcctcagcctcattccattgcgcgctaaccatatcgccaccaagctggccgattctcagaactcgggcttgcatgcccggacagtttctttcacaatggttaacattggacaaacagggcaccagtacctaggtattttcaagttacttgcagagacatgattttactcccaatactcggttgaattatgaaaagaaaggtatcgagcctactctaagaagtggttcatctctcactacagcctcacgatgtccgaataaacgaggcaacgtagaattgtagtagaatcataatccaccatgtcgattttgaccatagcggagcatttcactgtcttggcttcttcaatctcttacttttatctcacttgttgacaactcttactatttgacttctctcaattcttaataacgtttacttcttaactcatcttacttcttgaaaactctcacttgttgagggtatcttcgcggcgcctactccaaacgcttttagggttcccagctgcagaagttttgtttttttctttctgtagaataggaagctatagacgtagttacgacgtagttggtacagattaagcaggcacgatgttgcgtagaggggtatatcgtgtttcccccagcagcgtaaacttgtattcacaacatcgcagccatggcaagcaatatcaccaacatcattgttaatgtgttcccggacccccgtccacccacctccgcccaatcctccccatctccctctgcctccgggaccaatcggtccatgggccagcagttggtggcttcaccgggcttttgggcccttatgattgttgtcgccggatgccttgctggcgctggctattttttttggaggaggccagcctccaagagcgtggacattgagggtaccccgtaagtggtaaaccatgattctcatggaaactatattggcgggtctttgcctatgtatgcacagaggctaatatatcgtaaaatagcctcaaagacatcagtgtgggcgagcagcccaagcagaccagcgaagaaatccacacagtggatgatgtcgaggcccatccgcctcttgtgacccccaagactcccaagacccccgcgccccccaagaccctcaagactcccgaggcccccgcgccccccaccacacccaagaagaagatcccgagctacgcagaagtggccagcgccactacgacgacgcgcaatgtagcacacgggatagagaaggggctgtcaatctcggtatgctgaggcgatgccgaggcgacggcgttcctctgttgttttatccttttcttctctccgagaacctcagtgaggtgagatgaatgaaaacggagctttttatcaaaccgggggtggaggaggaggtgttttggcggcgttcctctgttgttttatccttttcttctctccgagaacctcagtgaggtgagatgaatgaaaacggagctttttatcaaaccgggggtggaggaggaggtgttttggcggcgttcctctgttgttttatccttttcttctctccgagaacctcagtgaggtgagatgaatgaaaacggagctttttatcaaaccgggggtggaggaggaggtgttttggcggcgttcctctgttgttttatccttttcttctctccgagaacctcagtgaggtgagatgaatgaaaacggagctttttatcaaaccgggggtggaggaggaggtgttttggcggcgttcctctgttgttttatccttttcttctctccgagaacctcagtgaggtgagatgaatgaaaacggagctttttatcaaaccgggggtggaggaggaggtgttttggcggcgttcctctgttgttttatccttttcttctctccgagaacctcagtgaggtgagatgaatgaaaacggagctttttatcaaaccgggggtggaggaggaggtgttttggcggcgttcctctgttgttttatccttttcttctctccgagaacctcagtgaggtgagatgaatgaaaacggagctttttatcaaaccgggggtggaggaggaggtgttttggcggcgttcctctgttgttttatccttttcttctctccgagaacctcagtgaggtgagatgaatgaaaacggagcttttttatcaaaccggggggggaggaggaagtgttcttggtggcgttcctctgggctttttggccgtttttgcttctctccgaggacctcagtgaggtgagatgaaggaagaaaacgagacttttgtctctactttttgttgttttgttgtttctgttttctgttgcttttatttttatttttctttggctggtcctcttcggaggtgaccatgtctaaatacatactgccgccgggtagtttcatcttgggaatgcattttgctgttcaatgtagaccccttcgcagacctggatcttatggtagaccctgattgatctaacacgagactttgaagaggccaggtgctaaaatttcctttatataaaagttttctcttagatgtctcctagatgtctcttacctttggctcccattatttaacaatcatctttttcttaaactgtaacgtccataatagttcagaacttttagggaaatatttccgctatagaatctaaggacaatcactagaagtaacatattgaatgaattaactacatcttgctatagaaacccaagcatctaggtagtaaaatttcgagaatatagggcactagtccctgatttatatatagcttcatacacggggtgagagaagtgttttcaactggacagcattaggagtttcattgagcaaatccattcatattgataattcacgacgctttaatacaagataaacagcaattttcagtaatctcatccaatgacgatcacttctagtgagacccaatttctcctgacccttaaagtcgagctaaatatttccaaaatttcttcccaaaactccgaggcgattttgcgatagcaccatcactcgctttccgaacactagccgccatatcataggatggagggctttggccaagtttgtcattcatattattcacctttgaggactcaagtaaccgtccagaagagcaaaagtagtcaccgcgatcctgagagttttgggctagctctcttcgcatctggctgttgggattctgctttaaagaagcataagctcggttgaactcactgtcggagagtctttccatagcgatatagatttcggggtttcctatgcgttcttttagaacatttgataactttataaccaactgcatctcctctttcaataacagaaagaacttttcaaggtagtctatcattggcggggtaccgtcgtcgtgcgtagggtgattctctgctaacttttcgagctctgtctctagttttataaactgttgcagtagtaaccggcgagtacgctcgttctcgatgacagaggtgagtgcatctgggctcggctcgcataagtggtattgtggagaagggtgatagtcggagactagcttcaattcttggcttccaagtagttcggacattttagagataatgaaacgattctcgtgtggtaaactttggtataagatagagaaggaatattgaatataatttgggatcgaggtttgaaatagtagaaagatatatctacctgggcatccttgatacgtatactccttgccgccgcctaataaggaatggatctctacctaaggtagcttccctcccaaaccttgggactaatccgagcccctctcacctttagcaattaatccttgatcatgctcaaccagggcgtgatcggtaaacttattttgcgcgtttaccagacaaaattggcattgggtccaaacctagcgacgccgaattatatcgttttggaatcggagcttgtaatcaatacgtcacgaagtcacaattcttaatcacagacagtagccctggagtcttttcgctctcaatattacaagaaatccatagaccagattgactctcccgatctactcatttttacatcgcgtatgtatccaaatcagtctcctgcttcacgctcagcatcatctttcgccttggaggctcgaagatgtcgcaatgtggaaagatgctcctcgggctgcttcatattttttggaagaaagcgccaaaatactccacgatactttgtttgaatgagcgcatcttacagaagatctaccgacacctctcactagtcgatcaagtttgtctatctctcagctgcaaagagctcttcgccctattcgggacgattgtgaagcacaacgatcttgaatttccacgactcttgcttattagaaatccaatactgtgcgtgaacagtcaggatgtgctgcgaaatcaactccttcttcgactcgaaaatcgccgctgggcctactgtgcaaagtgcttgaaacttcatccacggaaagaatttgcaaaatatctcctgagacaatcagccctggagagatcctgcgtatactatgctggtatagttgacctatgtccctgagcccaaagtcaagatcctcaaatcaagcacaacgccagccgaaaccaaatatggcccattcgagtatgactatgacaatggagaaacccctagcctcggccacgtctgtatgtttagcagatctggctacgatgtgcgagttgctctggttttatatattaataaaactggcaagttatgtgtagcggctcggcatactataagcttctcctcctccgcccatctcacagctgagccgacctttgcttgttctcatcaggatctcctatctctcgtcccagggaaacttactgcaaaagatcctcacacgtaccacattttggctacttcaagacctcatcagtatctcatgtctcttgtccccggggagctggtcccaaaagtctgtcccatttgtcagactttgattacaaaatacgatttgcctgaggatatgatgaatcaggctgttttctgggtggttcgagatttgggaagctgtgaatggcctgcagaccgaccttggtttgaccagtgtcgtctcgccggagcacggttttcacttaatgagatatactggtgagtttatcaaaggatctgtggagaaagaagagctagtactgattcccatataggtatcggtcgcagaacttgaatgactccagggccatgtgataactataaaagtaccccagaggcaggcttagacagcttcccacttctcttctcagtagtcaccccatggtattctaatgacgatctaactacgttgtatctgtaaagaggaaaacaactagtgtagattcggctaagatctgatggacaagagggagagagagagaggaagagggagcggaactatctagtgatctggacccacatgggtgaccgccttccggtcacccaacatattctcctctctagcaccctctcagtaacaactctgctctcacacctgttttgcaagcagggctatcggtgcccctgtccccgttacagggacccctcttcaatagctagacatcaaatgccaaggttgtacggagtacccgtggaatgcatgccacaaggaccgtgcatatatgcacgccataccaaacatagcttagcgtgtaaccttgatgatctataagtgctcgacgacctgcatcttcaatcgacagcatggtgcatttatatgagacatagctggacagaatcagagatgggatacaatggaagcgtctgggtcgatgcgtgagagtcgcaatgatattatccagtggcttaagcatgcagagtgtacactgttgcaccatctcttaacgactctagagactctctaggaccacactactgcctcaataatcatcagaagtaggttgagcctccagggtagtcacatgacttgtatgttattgctattgctattgctttttctttccttacttacctacattcatttatcctttagaggactcaaccacatcagaacacaatcacttcgacatgcctggtaactatatttatcatccaccacatgacttgtatgttctcaatgtctcttttgttctcgatgtcttttttcttttctgttgctttcatatacttacacttacacttcagacaaccctaccacatttgccctccgtcttccactttatgaggtctattctcgtctaatttcaatgatctgatttcatgtgctctcatcatactctacaaattggatgaaatgaggctgactggaccaagcatgtggtatcaaccatatccactcgaccacgtccagccttgccgtgacgagttatggttccaggacagcaaacacaaaacacaaaacataacaaaaaaacaaaaaaaaaaagaaaaagaaaaaaaacatccaagcactttcaagcatcaacttcaaacaatcatccacttcaatcaaccttcaaataatcatcccattcaagcatcaaccgtcaaccgaccatccacttcaaccatctacttcaatcaatattcaaccaaccacttcaaccacttcaactacttcaaccacttcaaccacttcaactacttcaactacttcaactacttcaactacttcaactacttcaaccacttcaactacttcaaccacttcaaccacttcaaccacttcaaccacttcaactacttcaactacttcaactacttcaactacttcaaccacttcaactacttcaaccacttcaaccacttcaaccacttcaactacttcaactacttcaactacttcaactacttcaactacttcaaccacttcaactacttcaaccacttcaaccacttcaaccacttcaactacttcaactacttcaactacttcaactacttcaactacttcaaccacttcaactacttcaaccacttcaaccacttcaaccacttcaactacttcaactacttcaactacttcaactacttcaactacttcaaccacttcaactacttcaaccacttcaaccacttcaaccacttcaactacttcaactacttcaactacttcaactacttcaactacttcaaccacttcaactacttcaaccacttcaaccacttcaaccacttcaactacttcaactacttcaactacttcaactacttcaactacttcaaccacttcaactacttcaaccacttcaaccacttcaaccacttcaactacttcaactacttcaactacttcaactacttcaactacttcaaccacttcaaccacttcaaccacttcaaccacttcaaccacttctaccacttctactacttcaaccacttctactacttcaaccacttctactacttcaaccacttcaaccacttctaccacttcaactacttcaaccacttcaaccacttctaccacttcaaccacttcaaccacttctactacttctaccacttcaaccacttcaaccacttcaaccacttcaaccacttctattacttctaccacttctatgtgtataccttcgactcgccgaggaagttgcaccttcctcgaacataagcgaggagcactctttgcatagtttgcagagaaggggacgcacaaaaccagaaggaagagcacagatggttttccttttctcttctctcttcgtacttggtatttgttcgaaaatgcactcatttctctgaattgatctggcaggtaacaatggggaggccctatatattcatgattactgattaacaataggtttttaaacctgcacaacccttcgatcccccctccagccctcgagtgctccggggtaattgttgtgacagagacacgccccgtacctgtccagtcgtctcctctccgccgtcgaggggccattagatagccaaaaccacctgtcagagaagatcatccggtaggattgcaactgcaaggagcgtcgagatgacagatttgcctacgcaagtttaacagagcaagggggtgtataattgtaagtgaagagtacttgtcatggaaaagggctaatatagtatcttggcagattttgaagagagatgccagagccagtgcatcgaccaggtgtttttactgtttttacttttttttagcttctgtggtattctttctcatattatatacatgtttgtctgcggagaattggccagcttgagtaccttcgcccgtaataccacacacgggatgaaggagggtatgaaagagggcttggaaattcagctgccggctgggatggttggctgaggtgatgccgaggcgacggcgttcctctgttgttttatctttgatcacattttgctggtctctcttattatgcagaaaaagaaaagaaaaagaaccttagtatgcaatcatgcattccgaagtgcctcacttttgatagatacgtcatttgtatgccactcaaatttctattagaaagttgcgcttttaattttaatatacccgtcatcctgacaatttctcagcggtcagtcagtcggttccttctttgaacgcggcaaacttatgaaaccatgatattcctggaatttgtggaatttatggactcagcagctcattttatattctacatcaccctctaatcccgaagccctctaatagactcaacagccttgagtgaaacggtatttgaagatgagctgttacatatcgggggacgaaactgatgaagagattgatttagaagaatctggagagatatgtcttctttaaagataccgatacaatactttcgaaaacggactaccaagaaaatggcctatcgatctaaaggggatattggagacagagattgcacttcgggagaattctcaacgcgagatagccttgaaagagaaaatgaaggaacttgctaaggaaagtatcaatgtgactgttgttcaagacttacgggaggaattgtctatactttcgaagaaatattggaccttggaacgacgttggtggaagattaagtcttcgattaatgacagcccgctgaccagaggtatcgattactggcgttcacagccgaaatggtacatgcatcgagtactttaggaagattgcgttgggagaagaggatgttgctgtagagactgtggatgctgttctaatcgccagttagaacagaaatttgcagttggtcattgcaccgtggagtgttcttgttgtgagaaatcccgggggtttgcactcgacccagagcaaaaatcccaaattcaagatttcttcaagtttgaaatcaacggcacaggtttctggtattacgatagaatcaaactcgcttctctgctagggttgatggtcggcaattacgaaaaccctttggatctcatcgttcgcttgccgccaagatatacacctccctctgaggaatcacgaaggagctttgtgtcgctgtcatcacttgttagcttacggtctatggatatttccgaatgaagcacaaagcaatggagaaagataatggagagagtggatcgaaaaatgtgtcatcattgctctacctagctagctttatagctacccaatccgattcgacacttcctggctgctgtaggtgctccaatactccacatagcgcttggtaaaacgatacaagtccgctcgattttaaaggaaaagaggacatggatcgaaggtttgatcgcatctaagcacaactatattgtgatcaaatctcaaggaaatgaaaattactagcgcggtaatctgatatgacgggtaacggagatcaggtggagttccgcgtggactcaaaaggttctgggctctggcgggggaaaatacagcgtattttaccaaacacggtcatatcccagtctagttagccgacatatatgattagtcagaacggctgtaactcagcaccctaccgcatctataatcttcatcgctcactcctagaatcatggactggaataaccacactgaacataccgatagccactacagtcccgatgcggcggatacggagttccgctgcggtctctgcaacaaggcatacagtcgccgtacgttgatctatgtgcatgggatcgatctgtcgtttgacgcatctgataggagatctccgagaccggcatcggcgtcggtgtgccaaaactttcggcaagcaacgcgcatctaagcgcaagtcttgtgaaacttgcgcccaaaagaagttgcgctgttcattgactcgtccagcctgtagtcgatgtgttcagatgggcaccgcttgtcactatcctaacaggtcctcggcgtctctaatccagagagatcaagatacaggcccggagaatgtgtcgtatctggaaccaactctaggaccgacatccacgggtttaacccccgatgtccctgtttcagccatgattttgcccgaggatgccagtaatagcgctcccattatcgatgacttcgcctggagcccaacactcaataatatcaattttaccgttgatgaaactggcttttatgatcaggccacatggcctgacccggcatcagacttcgtggatcatctatacagcccaacgtccttctttcttacaccgcaggaaaggttcaaggcacccaattctctattacttccgggagatctgataggcgtctccctaccacccctatcctccccggcgggtagtggctaccgagagccgtccgactccgacttctcctaggatattacaaatatatttgccagctccttcctcccagacttgtcccatctagcacttcgagacacatccagtctatctcaggagcttttcgggatcctgcgtgagtatccgcgaatgatgctacaacccaacttctggtctcccttcatccaccgccgtctctaccggtgcgctgagaacggcatggccgagcctctcggtattgccctggcctgtgtgtcggcctactcgaactccgtcgagtccagccttgagttcgttgacaacatgatcaactcggaacgggagcggctggtccggcaagtttcacctttacagcgatcgtccggaaacctgtctcgccgccctgcatgctgtttgcatgtatcagattttgggactctttcgggggccgtccatggacagccatagatcggggcatagcacgttcttcaaagatgggcgtgaagggcgtcgcgacgacttgggcaaggccgcagaacttcacggttcctttttactgaaggtgggtattttagcgtttctcctcgttaccctcaatctacaccgctcattcgccgatcgccgtacagatgactcggggactctgcaagctgtaccaaaatgctctcgtcaggaacgaagcaggctggcccgagtggaaatttgccgaatccctccgccgcaacgtattcttcgtccacatcattaatatactcgccgccgaagctcggaagctgcaccgtgactactttgagccgttgaatgatgccatgattctacagatgccccttccagcaccggagtacatgtggcgcgcctgcagcgatgaggaatggtcagtggcccgcgaatacgctcgcccgacatcacctactccgtgtacgctccaggagttgcttgacctgaaccttgcgggaagtttggacgttgcgtcactacaacctttaacaaggatgattttggcgtgtcatagaattcggtctaagtttaacgatgcggatgattaaatgagcatatgattactctattctttcatattctttcgttgtgctctctaatcccttgtctacttggctttctggtgtcatattggtgcaagatcacaaggtcccgcgggcttgacgtaaataggactaaactcagataggaaaagaagcggtttaggttctagcggtaattaaacattcagactacccgaaaaaggcacttataccgctgcgtaatatcctctacgcactctagatagctggctcgggggagggtggggcgacgttgttgatggaccctaagcttaatttaccatgggatctccccttttctgtaatttccatatgtggacttgcaaccatgtatcaatttattttacttaggcactcgcacaatgctactgattcggaaacggacgaggtaaaataccctactgcaatggttatggtgagaactttgaacgctaaatcgtgttcgccattagaatatccaacctctagcaatcaaaggagtccaccattcagtatgaccctcattgtggagtgtcccccattgactcgccctcgcaacctctctgtacaattccatatcgataagactatccttgatgatattcaagtcaagcaaataatcttgtctgccagttccgtgaagtgacagcgataataactggcggcgtggtggcacttacgaacccactccaagtcgttgaacgcttgcaatccactagttcgcaggccgatgcgcggttgattggtagtatcggcaataaccaaggggatcgctgatattatcacttcttccagggtgtatgttgttgatgatacgttcatttaaggcctagagtttcagtattacttatggtgggtcacggagaggtgttgatataggcaatgatgacctcttggggagtccccgtacctatcacgcccagagtaatgcttctcaacacaattgaaatccacgagtggcttttcaccatatgtggatcctataataataccactcgggtgtttgatatgatcgcccatagctagcgggggccgttatatcgaacgggtgattcggtgagctggaacggccacggcagattgaaatggtcgcgcgtggggcttttttgacctgaacaacttctcaatattgaattatccaatagtgtttctcgaggtcaggtcactacgccaaccgcaacttctgcaatgacgattacgtcaaagctatacagctgtcttgtttttctctgggtcttcaccacaacattcgaacgaatatccattccgcgatcgaaagtcacgtggtgattccccttatcagaagctcagcctcaacaaaatacaataatctcagtccaaaatcaaggccgctgattcccggccgattaagaaaaaaaaaacctgcgtacagacaaaccccgtcgaaccccgttcagatcccgttgttgtaaatcccaatcactttcgaagaatgcgtgctgaattgtgtgaattcttttaccataaagattgccaaggctgcctaattaggcttagtcctaaacttacctttataattctcttaattctacgcaacgttattggctgagccatatgttccgcctttttcgtcgggattctgccggtttcaagaaccaagaataagattacataatccaaaaaatgacatgcatgtcaacctaaaatgccaacctcggaataccctcactttagacagcctctagctctctccaacgatcctttgatttcaacggggtttgactgttatcctacaccttaccattcttccccattcccccattcccccgttcccccgttctccatccccccatttccccatttcccccttccccaccggcagtgtcaccggggagatgttagcccgcgtacggagacatcgatgatcacattttaggcccactggcccctcttttcggcctttggtctgcaataggaggtgtttggccttttgtataaaaaaaaaaggtgaaacatatgcaggatgtaaagataaactcataaactatgaggacgcacttgtaccatctcggaagttcggccgggatgaatatgtcaaagatcatcttctcggccttagcccgagagaggacgtcggtgccaagcccgatagatggagctattgcaggagactgaaaaaccagaagaataacgtctccaatacataaccaggtaatactagccatatgacttaaatatggggcaattgacataatttgcatgtacactgccaatcattcgccagtcaaaatgtgaagaaaccggcggtatagctgtctcggcaggcggtagctacgatcaaggggtttccaagtaattaacctacagaaccgtggaaggttggaagctccaacagcagatggaccaatcataaaaggacaatacaaagggtccatatgaaaagtggacttgggtgtgtagtacatgtattgaccccgcaagaaagtcaaaaaccaaggacacacattgtgtcaagtataagttacagcatataaagaccttggagattccctcggcttcctctttcttgcatctatttgtgataccctgtgctaccatgtccctctacactaccattaagactcccaatgtcacttatgaacagccccttggcctgtacgatttcccccctaatatcaatgatcagttcgctaattggttgctgcttctaggttcatcaacaacgagttcgtcaagggtgttgacggcaggactttcgagaccctaaaccccaccaccgaaaagcccatcacctccgtctacgaggcttccgagaaggatgttgacatcgctgtcaaggctgcccgtgaagccttcgagggtccctggaagaaggtgaccccttcggaccgtggtcgtatgctgaccaagctgtccgagcttttcgagcgtgatatggagaccctggcttccattgaggccctcgataacggcaaggccgtcactatggccaaggtcgatattgccaatgcggctggctgcctacgctactacggtggctgggccgacaagatcactggccagaccattgacactaattccgagactctttcctatacccgtcacgagcccgttggtgtctgtggtcagatcatcccctggaacttccctattcttatgtgggcctggaagattggtcccgctatcgctgccggtaacactgtgatcattaagaccgctgagcagacccctctttctggtctatacgcctctaagcttattgttgaggctggcttccccccaggtgttattaacgtcatctccggctttggtcgtgttgctggtgccgctatctcgagccacatggacattgataagatcgcctttactggttccacccttgtcggccgtatgatcctacaggccgccgcgaagtctaacctgaagaaggttactctagagctgggtggcaagtcccccaacatcgtcttcgaggatgccgatattgataacgccatctcatgggctaactttggtatcttcttcaaccacggccagtgctgctgcgccggttctcgcttgttggtccaggagagcattcacgataagtttgtggctcgcttcaaggagcgtgccgcccagaacaagctcggcaaccccttcgagggtgacaccttccagggccctcaggtttcgcagcttcagtttgaccgtatcatggagtacatcaaccacggcaagaaagagggtgccactgtcgcttttggtggtgagcgccacggtactgagggctacttcatccagcccactgtttttaccgacgtcactcccgatatgaagatcgcccaagaggaaatcttcggccctgttatcgccgtcaccaagtttaaggatgaggccgatgccatccgcattggcaacggcaccaactacggtatgtattattcacattcatcgtgaaattatgatttgtcgttctaactgtatctaggtctcgctgccgccgttcacaccaagaacatcaacactgccatccgcgtttctaacgctctcaaggctgggtatgtcatatctcattatttactgctgtaacagagctaactttactgcagtaccgtgtggatcaacaactacaacatgatctcttaccaggctcccttcggtggcttcaaggagtccggcattggccgtgagctcggttcatatgctcttgaaaattacacccaggtcaagactgtgcactaccgcctaggcgatgctctgttctaaaatgaccaagaatataagaaatttcatctgggtgattgaatgcaatgaagtgatgatacgtgattggaaattttcgttttgtatagagtccaaattgaagaacattggttcctcaaccgcttttccgatacctcgtaggacttctatatttgattatgcgctattaagatcctacatagtcccttttgatcgccagaactattacatacaattagtaaaatccaggtgtttcatagtatcgttatcaagctaagtgagcaagcacaccataccagcctaagcaacagcggtttattcctgggtcattctgtgtaagcctccttcctatcaccttcggcccttgctatcgtgttcgatgttcgaggtccttgttgaaatgactgagtgaactgggcatcgggccgaggatccacatgcggaacgaacagtcaaaactccatttcctgccagacagatagatagtcttaagcaatacacaacatgaaatgacagccaagatcattgttcccatactcagtaatctaaacatcaacaaatctaaacatcaacagtccttccgctggttccatgtatgtaagactcttcctcaccatctccagcccttggcatcacgtctgagatcatttgccagatcaggtaggtacctatcgtcattcaaggatatcagagccagagaaaaattcgcgaagttaattcgagtccattttgtgtccgtgtcaacacgctcggctcatttgaatccggagattttcctaaattccattggcttgagattgcaagagattttgtaggacatacaacttgagtgtggccttgttccagatgatctttgacggaaccaaaaatgcggctcatagccgaacttcggaagttccctggatcgagtcagccgtggatacgcgacgatattcaatgtgcttagtgacaaccctgtatgcctcttcaaaattccagcggattttctcccacgtcgcgtagggaagagcccagaactgctagatgtcaagggattcgccttccacctgttcccatacaaggtggatgatataaccacccgggacaatgtcatgttcgtcttgttagccaatgcgatatccaagcagccgaggagtgacagagcattctttctctgtgagaagtttcaaggcttccaattccacatgatcacctggtggaccggcctggggtttccgcacatctgaatcctcaagtcgggtaccatcaagaggaatctgtttgtagatgcgcatgaaggccgtctctttcccgtcgcgacaatgatactttccctcggtgaaagctggacccatgccaacggccgactcctctggtgtgatggggattggaagttcgcttaacttttcaatgacggtccattcccaaaggggataacgagtagcatccgggccgtcctcaaagccgatagtgatctttttaccagacatattgggaagaaaatggatttcagccatggtgagcgtgtacggggaatattatggaagctaataaatgtcaagaaattggatggagatgaagatgggaaaagggaagaggttggtttgatggaggtgaggataaagtcaacgggaaagttggtcccaggtacaaattctagaggattggcgtgacaacattacatcaccacctagctcaatatacaaacatcttgatgaaaacaagccaagctaaaagaaaagcattatgctccaactgcgccgatcgtgattccattcggcagttcaagtccgatgggaagtccacacagaaatttgtcggtataggttgtcccgcgctttgccgcgagtttctcttcgatatccctatacatgtcatagctagttgcttgtcagtatttcctaacgcctgaagtcgatcgaactcacgcattcatttcctctattgtaagaaccttcttcgcgtcttcgactttataggtgggaatatctttgttgacggagaaacctatgcgctagtcagaaaataatgcaccacaacacccgttgaatgaaatccactcaccaatccgctcgttgatattgtaagccgccttggccgctgctgcctgcactcttgtaacccgaggcagacgtacctcctggtaaacagcgagggcttgggtaatatccccagagaaataacgcttaccaaataagattccaagtgctgccgcatcttcaatagccatgcaggctccttggctttgatgaggcatcatcgggtgtgcagcatcccccaagagacaggtgctaccgcgttgaagatacgggtacgggtcatggacccagagacgccatggtttgatctctgtcccaatcttcagatggtcaaacacttgtcggtctaattctgggtatggggcgagaagttcctcaacagggcggtcttcggccccccatgcctgtgttgaatagtcgccttgctcacgtgggaagaagcagtagtacgacagaagctcaccaccgttacagggtgacagaacaatcttatcccattttccttcctgtccaccccagtactccagtgcgctatcttcggcgtagttcaccaggccgagcctgatggcatcctcggttttgacattggtgtgcaagcagctctgatcggaggctcgcttttctggcgtaattccaatgattcctcgaacggccgacccgattccatctgcccccacgattaggtcgtggcttacaacctcaccgttctcgaagacgaccgtactcgtcttcagatcgatatcgctgcactagatcccaggcaatattagcgcatgctcaattacagacagcttccattgataactatacccggtagttcactttgagagttgctggcgctccttcgccctcgcccagtgccgaatcctttagcatggcatgcatatattggcgatgaaacatgttgtagacatatccccagcgcttctcataatcgtcgaggtcgtacacactgacgggctcgcccgtattccagtcgcggttgataagcttcttcaaaaccaccgggtcacccttggcgatatccacgttccactcgtgtagccagcgggttccattggcagcacacgaaaccgaagcgccgacttcacctgcgaagtccgacttttcgtagatggtcacagtgtgtcctgcacgacgtaaggcaactgcaacggacattcccccgatgcccccgccaataacgccgacattgagactcctccagcctggcatggtgaatatagataaatcaataaaacggggtttgaggcgggttgaagtgaagcagaaagatgtgagtgtcaagtaaaatatatagcaaattgtctctcatattaatttcttatctctatatcttctcatatatacttcacaggtcccgaccctacgtcggctggcggatagtgcactcgggtcaccgcgggccgcgcactagcgcttatcttcggctcaattcaacagcgttatccgatcaaaagattcattcacaggaaggctgaaggtaaagtggaaattgaaagagggaaaaacatacaatagtaaggacaccctatacagcgcaactaagatcccaggggtgggaaatccatatcacatttaggtcgtcttacctacttgccaaagctttccattctcagccttgtcactttctcgataggatagatgatttgattctgaaattgtattcacatgctaactagcagagagtctttaattgatcaaaggcgaccggtatgtaatactagttatggctcaattgtacgaaggagttcggttgaaaattctattaattttgttctatcaccggcaagccaggtgatccctagctccgtctctgaatatcatggtacggctagaagtcatgtaatagatagtgataccatatggataccatggtaaattacacagccagaaatatccctcaagtggcgctatacccgaagtagcttttaggtaggtggaaattcggtatccaacgtcgtggagagtgagcaatgagatgatgcaagtgagagatttcagggctttagaaaccagcttttcccagcccgctgtcatgattcataaaaggaattcttgattgtaagtggagataggttgaggttgggttggaatctatggtttcaataaggtttgtgacaatgagctgttgcattcttcacatttcttgtctaatttatgcttctacagtccctcttcaggtcggaatgcctcttcggtccgaaatgaagagaagacccgagaggaatgaagggatcgggaaaccgagaatatcgggatcggatcccaggagaataggaggaatcttggcttcccataccattgatatcttgatgggaacagcatatttgtatgagaatgcgtgggggtcgaatgcagtactaaatcagggctgatattggatcctccatctttgaatctaacacctgaatacactgctagaagtcattgttcaactgaatagacccggcctaatttctgcagtcttctgaatgtggtcggttaaaactaatgataatcaaggcacatgatagccttcaaataagtgtttctataagggcgaaaagactaaccacaaccctaaccttgaaggaattcgcttcatcttactttctatgcatccctcgctttgaaataccagaaatatatcactcatgttgcactgacattcacccccacgccggggtgctccttacgtagtccttaaatgcgcttaaacacgaggataccccacgcggggagatgatcttttctaaatgcaacctcgtcccctgttgtttctccccacaaaaagcttctccccacaaatagccagtaaatgatgatatgatcggggtaagtccggggtctggctttaccccggtcttttgcaggttttctgcggggaaaggtattcgggtgtaccgtcatataacatgggtttgattggaatagcagttatagcccagcaagttttgggcattgcttcttatgccatactgctcccggaccactagatatcaacgccacatatctcacccctgtagaggattccacacaactcgcaactcgtccgacttccgagtctcactttccacgtgtgatttttttcttcttctccctccttataccccttgcctcctctggtatcttcttatcaactttggctcagactttatatgaattagctggtgtagtcttgctgcttatttatccttctctcgtcttcctcatacttcctccttctcatattggaaaagcaaacagaaatgtctcccagaaactcagacatcggggtgggagatattgacaagtctcgcgtcgacaatgtcgaaatagtcgccaatgccgacaggcccaacccacagaaagaagcccccgaatacgttgccaacctgacgcccgaagaacgcatgaaggccgagaaagctctcgttcgcaagattgacctgcgtctactacccatgataatcatcatgtacattctcaactacctcgatcgtaacaacatcgcctccgctcgactagcaggcctcgaggaagacctagggcttgtgggcaaccagttcgcgacctgtgtcagtatattgttcgtcgggtatctgttgatgcagatcccatccaacctgatgctgaacaaattcggcaagccagccctctacctccctgttgctatggttatatggggtatcatttccaccgctacagccgctgctcagagctacaccggtctcgtggtcattcgcttctttctaggtttcgtggaggctgcctacttcccaggctgcttgtacttcctgagtgtttggtacacccgcaaggagttgggcttccgcaccgcagcgctgttctctggatccttgctctcgggtgctttctcgggtctgatcgcagcaggtatcactaaaaacatggacaacgtgctcggactgcgcgcctggcgatggctattcatcatcgaaggtgccgtcactattgcgattgccttcatctcgatcttcgttctccctaactttccccgcacgaccagctggctttcggaggaagagaagcaactcgccgtgtggcgcctggaagaagacatcggcgaagacgactgggtcgacagcgaacagcagaccttcctgcatggagccaagctcgccttcgcagacatcaagacctggatcctgatgctcatgatcctctgtattgtctcctccgcctcagtcaccaacttcttcccaacggtcgtcaaaacactcgaatacggcaacatcgagactctactcctgacagcaccgccctactgcctggccgtcatctgcgcatttaccaacgcatggcacgcagaccgtagcggagagcggtacttccacgtcaccggaccgctatacatttccgtcgtggcattcatcattgctgccaccaccacagctaccgcaccccgctatgtggcaatgatgctcatggtgccgtctttctactccggttacgttgtcgctcttggctggatctcaaataccctgcctcgaccggctgcgaaacgtgccgctgctctggctgctattaactgtgtcagcaatggcagcagtatctatgccagctatatgtatcctgattctcaggctccgagattcggtccgtattcctctaccgctggctttgtttctagcagtcctaactaatcatcctatagtgcctgccatgtctgttgactgcgccacggctttcatcgccattatctctgcaacggtgctccggtttatgctcgtacgtctcaataagaagctcgatcgcggtgaggaggttgagggggctgtccctggtgaaggaagccgtcgtggtttccgctttttggtttaaatctggttatagtgttatttttatttctgatgcctatgtggctatagtatacgtgctacactgggatctgcaatagatatatattgagaatatcatttgacgaccgtgtaagaggtcatgattatatatgtactatgctccgcataacacgtagaactagatgctaagtggattccttccctttccaggctaattcgtcaaagctgggtggcaaaatccgggaagataccatttaacgcgctcaacaaattggtgaatcctaaagccaataggactaaagtcctagtgatcactatgcactgcgataccaaggtctaaccgggtgttttcctccatgcacgttacgggcttgcttcggaggtggaggacaagaatacataccttgtggtcatgcctgggagttgttataaaaataccatcttctcattacacaataaacgcgtgataaagatatacataataatatgctcacgaatcgaaaaaggccgagaatacaaagatgctgtaaaaacaagcaaatccacagcctcaagtcatcctggtctgtctatgcaattcggatagccgagtgtccggggagaccgtttcccgtttccccggatattccccattatccgaatacaccgggccgatgatgagtgccgggaagtcctgaaccgcgactgaaaacaccaaaacaaagctgtcggatatcatgtccgagaatcaaatcattttaaaaaccccaaactccaaatctatgcggtataggaagatgccaccaattccaaggtagcatttaagcattgttatccaataccccgaatgggttctcgccctttgtgttcgggctagaggaagactcctcggccctttgcttcttagcccccttcttcgcgggaaccttagcgaacccctgttcagactcggaccggctaaccggggccgaggcagcatttgccttggaagcagcagccgagcgggtgcggactggcgagtcgggggtggtaaccttgccggcgatcttctgggcctgagctttgatgacctcatcgtcagtggtagcttcgctgttctcgccctcgatggcagccttgcgaatttcacggctcagactcttcagagcatccatgccggccttctcagcggcctccatgtgcgtgggctgcttcactcctacatccttgcgattcaggtaggagcggacgaagaagcgcgcaaagaggtaggtgaggggaagaaggtaggaaacgttcaaccagatggcgaatgcctgtccggtggtgtccgcacaggtcatcatctgctgggagtagccggattgctggacaggcgcggcggtgaaagaagtgcccacgttctcggcaagtccttctgcgcccgcagcccggaatgccagcttcttcaaccaggagaccgcaccaacatcggtggtggcagaggcagcggcggaagcggcatcggtcaggtgttgtaaggcggcgctaccggacgggtaggggatagtgtagtggacaaataggtaggcggcggccatgttagttccgaagacgaactgggtgatttgcatggtggtcaagctgcgcttgatggcgttagggacgcgaatgcggagggccgtgagggtatagtaggtgtactgaagtaaaaaaaagggttagtaagtttgcttaacaaaagcaatgcgattgtccgacttaccatcatagcatgaatagccgagttaaccaagcagaagatccaaatgggagctgccatgtagcggataccagcccacatgcacatcatagctcccgcgtggtggtaggtctgtagggtggagctcttcttgcccttggccagaatgatcgcggtgtcgacaacctcgtagaacttggacagatagaagaaccagccgaagtaagccaagccctggttccatagacggccagcatccgtggggtctggcatgccgttggtgaggtggaaggcggggttgggaatcgaccactcgtcagtaatggggctgtatgtagcagcattgccgtaaccgcggggcccattgatcttgcatagtgaatccacaagtccgaccagtccgtaggggtcgtcggtatccgggaaagagctcctgaatgccaggaacatgcctacgaaggtccatgcggaatacacagctaggaagacattgtgaagaacgacgaagagcttgaacaaacgagtgttgctgaacgcgtatggcttatatccgcgacttttgttgatacggttgagcaggaccacagtgatcgcatagacactggcgattgtgattggtagtcggacgtccagcacctggttatagagatcgttcgggatgttgaagggctgcttccatgtcggggtgtcaacgtgaggtgcggggacggtcactggaagctcatggggagggaaggcgaggagagaggcgggagggaaggcaatgcgaacaatcgcctggccaaactcggtgggcacatggaagtcgtgcatgattatcgccaacgcggaagcgttcaattcaacgcgtcaactagggagaaagaatataggagaaaagatatgattctaaagaagaaaaagaaagaaaagagaaaacggttgaagtgttggaagcccagtggatcctccagataaactgcccttgaaatttctcaacaagggcaatggccgacgatctcgatccgcccgcgtttagtttgttgggaattccaaggcttggctccaaacgtgccgaggttggtaatcgccacttgcctagaagagtaacacctgtgacctgtcgtactccatttatgtacgtgcacccgtggacatacggaatatgcaatagtggacttttctcaattgtatacttcgtgcagagtaactatggtgtatatatggccagaattgagcttccgttggggcattgacctataaattgcactgccaacaactaggatgattggataattctccgatgtctttagaagatcagaccgggaagtccggacatgtcgggactccggcccggtgatctgatgccatccgcatgcctccaaagcctgtactttgcagatgccccctacctcaatagggctgggtggggaaaagccgctgagtcagctggacaaagttccgagttccccggaacattctcaaccaaggtttggccggcaaaggttaaattgacaaaaaggcttggagggccggaactgtcaaggaaggaaccctggaaggtgacctcggattatccaatcgggatcagctgcttgttgggatactccagggttgaaccactggaatcggcccaaaaatgttggggatctgaaatcaggtatataacaaccctaatccgatcacatgcagcctcggtcttactggatgttgaatatgaatgacccaagcacgaagatatgagactcaccaggatagacagggactatgatgtacaactattgtacaccgtacaggacaaatatatcgtcatcatgacaaattgttcgatttccatcctaaaaaaaaaacacccatcgacgccaggaatgcacaacgtaacaaatacagggttaaaagtacagtctttagcggggcttggtgtcatggggaataggaggaggccccccgagtggtgttggtgacgaaccgtcaacaggagacgcacgaaattcagcccgcttaggtggaggcggtggaggagccttcttgcgttgagcgggttctgtggatgagaccgctgaagaattagagtgggccatggggatgggacgagcaggtgggcgtggaatccgtttgttggcttcggcggagaatttacgatcctccacaaatgtgttgaaacgtgatgtgactccaccccatttctctttacccaactcgatcttgtcggcatggcgttcacggaaatcttgcacggaggatgtgccccgtgcgggctccgccggttccaggttcatactagaagtattcgacgcgggccgggccggtgggctaggcgctgctggggaagagccagtgagccgtgacgcgtaaccactcaacttctgctttcctgaatcgatggtatctgcgtgacgctcacggaaatcgccgtatttctgctttcccgaatcgatggtatctgcgtggcgctcgcggaagttatggagagaagatgtgctacttgcagggtgcgactgagcaggcggggtgggcgccgatggagatctcgtgttcatctgggaaaagcgtgactgcagctcattgacaggtgtatgtgcaggcgacggagatttctcctggccgattccaaatccaggaaccgagacgcccgcgtttgctaggcgggacgtagcatcttgattgatataatcgtgggagagtaccgggccaggggaataagcggggagcgattcggagctggaggatgcattgcgggcgggaagtcgtggcgggggctttggtggcctttgctttgagattgagctcgaggcggaacttgcagagtccagtcgccgcactggtggtggggggagattgtctgtagaaaggccacttgtgtcggcgcgatacgggattggtgggggcggcctttggtactgttcctcctctacttcggctacttctcggcgatggggatcctgggcggttgtctgatttggcgcagcggcggctccatggtaattgatatgtttcggagggggcccaaataaagatgggtcttttagggccgacaagggttgtgagacatgctcggagcggtttgagctggtttcattgccctttcccataaacgatgcctaaaagcaagcaatggttaataccaatgggccgcgtcgtgaatacacgaagggttagcttaccacgtggcccctgatacccccctgtgacgaggagccgtgtccggagctggaggagtcaccttcctttccctttcccatccaaccggcctagtagcaaatacaagtcagcatcaatggccgaggtgcgagtgagcccgagaagggtgaggggtgaggggtgagcttaccactgagcctctgatacccccttgtggctcaggggtacgtccagagccagagccagagccagaggattcaccttccttgccctttcccatccacccagcctaatagcaagttcaagttatcatcaatggccgctagagttacaagtcccagagggacaacgaggggtgagcttaccacttggttaatgcctttgaaatcacctcgccaactctccttcccaccttccttgccttctgggtgccagccacccttgatagtattgcgtaaaccactcattctgctgcagacggaagtgcggggatgacaagttgctagttaagtggtaagggaagctgtgacggcaatatccccacttaatcacgtgcgagcttgatatagtaattgatctacagtgtacatgtgcgtagactagttataggacataagtgaataatttatgatcgcaaattctaagacaattcaactgaattcctaatgttccttcacgtgcttcaaaatatttgattgccaacagagtaagcggtctgaccagattctgcgatcacttccagaataagtaggcggtacatctctgccccaaacaggggttataatgaactttaagcatgtcttttcgcctgcatatggtcaaatgaaaatatgcagagaagattagcatggcccctgtactaaggatgacacgctcaatcaaagagaagctacctaatttaattttttttcatttacctgtccttcgttatggagataggatgcgggtctgcggacttacaaagtccatggatctgattggtcctactgcatttggaaatcatgtgatactacaaagacctcgagacgcgcgtctggcggttccagttatttgtgggaggcggtcaatagcagaatatatgttctgccggatagttgagggcggtgggatgataataggaagaaatgcgttagtgacctcttcggcgctgaagaattggcttgataggaaaaaataatctattaagtatatctaggtatggatttgcatagttgaatgactagccgggtcaggattgcttaacaaaattcttcagtcaagactttcttggagatatcgtcgactgagatcgttctcaatccattgctcaattagcccaacggtatctccaacgaggtgatcgtagtttgcaccacgtggaataaacatagactgatgtgccatgacttcgtccatgtcttccattaatatcggcacccaatgggagttatcgttgtacttccaatgatgtgacggtaagagtatgaacttgcggaggtgttgtttattagggtctgtggactccgttgttgtgatagagccattttcagttgagagagaaatgctttctgagagagactggctctctatctggtcggttgaggttgaggcagacgctgcggtacttgtgtgatccgccagcggagtactgttgttatcgtcggccttctcgatcgccagggaagaatgagaagtggtggacttcaagtgcttggtgtcgattgccatgttgctcatggcggtagttacatcggtttgttcggagccacttggcgtatctgagtgttcgtgcgaatgtattttcgttgcagattcatccatggcaatttcaccctcccttgcggactccttgtcttcctttttagactttttggctttcttttcggcttttggcttgggtggtcgtggcttgcgcccagtgctcgcggtatagtaattgacaaatcgtactctccaaggactggactcagcttctagctccatcaagtgcccgtatcgccgacgaagttcagagtaattattgacacaaccagcgaatttgaagggtgatacgactcgatcaaagatagatcgtgagagatgatcggtgtttttgttgacaaaatgcaaaacaccactgagaaagccacggtcgaccagacgcacatcattcttgaatggtgggtcaaagttggggctgaaatgggcggatttgaaggccggttccaagcccagagactcttgttctcgcgcaagcttctcttcatctgccgcatctttctggggtattaagctcatggttcctgttgctattacacgaggatggatccccaaaaagggaacatcaaatcctactaagcctaaaattcgatgctttgggtgcccatcttgctgtaagaggacaacgtctgcagctaggattccaccgagactatgtcccagcaagatgacatcaaggtcatctgcctcatgtggcgatagcctacaagtgcctccattagctgtgtacccagttaagaatcaagtaagaacgggctttctgtgtcggcacataccaggcactaaactgatccacggctgtttgtatctcgccttgagatttgtatctcggatacatgcgggtaaacaccacgtgtgactcatccaacgaggctgttaacaaatcatgaacatgtagcggcaggtcatgaaagctcgcttctgatcccatgaagccatggatataaatcagtaatagtctgcgcttttctgtggcctgatatcctccggggtgagggagcgacaggctggaatgagacccatcggagccagtacgaatattccccttcatctccatcgccaaagagagaagctgagataggaaaaagaacaacagaattcccttcttggatatccccaacgttccaaatgcggggacttcttggaacctgaagttgccactgctgactaagccaagcggttggcccggagctccaggagatcatatccacattgaatacttcgtatttagagagggagaagatagtgtttgaaggtgtgaaggtctttacagtattctagtaatctttgcacataatttttatactgctctgtgtccaatctctgctatcttccgcgacttccgcgactggcagaagaactatacaatcactcattacatcgtaatagttatctcatacctgtgttgttgagcaacagaaaggatgtggatcaagacattatagtttcatgcgtcctatgataatatctcatttaggctagtagaattcgcagatttcgaattatcacctcattgatctaattttagtattgtggtcccaaccctgatatctacgaattatatacggagtacggagcagatctagatgatttcctttccctgccagaagggtataaataggatggacattgggattgtgatagtacatattatattcaatacaacaataattccctgacactgatctcgattttctgatcgatcctgctctcactctcccctcacttcgaagtcacttctctctctttttttttcttctcgattttatcctgtagcctccttcgtttcagtaaaggtgtcacgatccacatggatcgctattacatgcttcatgtttgcttgctcgcttacggagtactgtttgcctatttgcttgattgctccaccagatcattctagcacctagctggaaagatagaatatatcaagcattttttcgtctgatattcttgttctgttggcatatggctgccaagctggttcgtgcctgggctcttaggtaaagtactttacgaaaagcctctcgagatgactatttcaagtatctatattcatgattactgattgacaatacctttgttacgatcgtaacgtttgcttgtttgtttctttacttgtttgcattgtttacaaagtggtcagctatctcccacattgcaacttgcttcttctttctcagttattctgaattaaatgcactcttctttgcaagacctggcttgtcacacccccttccccccgcctgaccgcccgacccccctcatccagccctggagcgctcggaggggattgatgaagcagagacacgcctcgcacgtgtcctgtaggcttatctccgcgtcggggggctatcaaactgtcaagtacagccagaccggtgaagtccgtcacagtagatcatctagcaggttgcaagtgcgaggggtgtcgagacgacagatttgcccgagcggattcaacagagcgagggggtaaatgagtgcgaataattcgaagccggatagttgagttatagcccacgcatttgtatcattttatgtacattatggcactgaaagcagaaatggaggctgtactctcatcttactccttgttaagatggacacttactattggctcattgaactactgtcagcattggcgtcaaagcataatgatccaataataaagtgccccataaaacgttagacaacttacgaactccctagttagggttgatcctacgtggccccatattagcgcaaactgtcgtaaaaatagactgagcatctctaagcctcatggaaaatgaggtttcgatgatttgtacatctcgataattatttaaattattatgtgacgtttaatttgaggacatgttggttcaaagggatcagagtaatatgagatttcattgacaagtctaatgcatgtcgaagcgcttctttgttagagtctctcccgagggcagtgcttccacccccacctggtctgctgtgcatgatctatgaatatcacttctactcttcctaagacttttttggcatctcgcatttcttgctaccttccgacttctttcgaatctgggcatattatattattctatacaaagatatccgggaggtaggtaaaacggtacctaaaacggttattgaatgggagaattctagcgccagtgtcttttgtactatcttttgtggtagttctttgtcttcgctttggggccttcacataagacaaaagtgccccgaagaatccaacctcaacccaccatacctgctatggcaagattcttgagattcttgccatttgcaatgttgggcactggactggacgatgcagatacctcggattcctatagatcggaatatgccccctcatcggtggcatcagcgggccaggatgttgtattcacgacagcacccggctcaaaaaacaagaattttgcagacgcgtcaagctgggcagatccagcagtgacaggtatctttcctggaacagtttcatggccctcagtcaccgagttgaccacatacccagcatcaagtgagacatcgactgtcaatgatatcagttcagaagccagtccgaccagcgtactggatgcaacatcatatacttcatcaccatcaccatcaacatcgaccacaccgtcaagtacattcccatcctctctcacatccaccacaacaacaaccacaatctcagcctcagccacagccacagcctcagaaacaaccgcagtaaacagcgactcaaccactttttccggtggcccatcaaaaacaacgaaaatcgccatagcagtcccagtctcagtaatcggcctagctctaatcctagcgctgctattcttcctctcccggcgacggcgccgggaaaaggaacgcaacgccttgccaccaccctacgacatagcagcaggccatcgaagtgcagtatccacacaagagctaatgatatcaccgaaatcctcgacaccagaagcaagacgttcactctcgaacccagctatgtcctcagcggccacgtcaatgcctctgcctcttccccggatcccgattatcagcatttcgccctcgacggaaagtcggggccggacgcccagtctcggtcccagtcctgactcaagctccgtgcgccgcatgccgacggcccatggacctggtgattctgaggcggagcttggggttgcggtggctgtttcgatggcgcagaggcgaagtgctacggagcaggaccttagagctcgggttgcgcctgttgtatcgtcgagggggccgtcgcggttggctaggatgccgtttgaggacttttcggatgatgaggttggtattggcattggtattggcggttcggatgatgatgacgatggagctgtttctgatgtgtcggatttggatgggcggaggagggagagggactttgatgaagtttctgtggtctcgtcttttgatgaggtgtcgccgataggtgagcaggagaggcggtttcggggaacttgaaggtgccggtaagatgatatgatataacgaagctaagcttggtctagagcttcttttacgtgggtctcttttggtccttggagtttgtgagtccgaagttttcattgtaaggtacaagttgtgtatttcagactacgtatttgaataggactggaatggtatcctaaccatcctaaccatcgtagttgtcatggtattgggcatttcgaggccatgtgcagtgtggaaatgaactgttggtgtctattcttattccgattatcttgcaccaccgaattcagccttgtgggctgtggcctttccgtgcgtcaattcccgaagagccatggtggcgtactggcttgatcccaactggaatttcaacacaacggccaacttatcagctgcagtctcatcggccatagcggtatcggtattctcatttgcaggttgcagattttgcaaatccgtcttgacaaactgctcatcgtccttggaataaagtttaatatcgaaagagtagttggctcccaacatgcggctgaaaatcttgcggtagccgccgctaaggctgatatccttccacttgcggcgcatattggacggatcaaggccaccaccctgctcgctttccatgaagcgacggtagaattccttcatttcgttttcggggtagataatgtcatatccaggctggggaagcaccaggtcaaagatggtatatttgccactggctgcctcttcggccgacagggcacgggctcgcatgaacatgtcctcggccgcaacggcactgttctcgccctgaggaacaacgataatttcaccgtcagcatcgacagtctcggcagcctcgacagcagaggcagactctttgtcgcggtgctcttggataatgaccagatcgccttccaccacccggtccccgtaaaggcgccatcgctcacttgcagcgaagttccagacaagcgactggtatgcgtgtacatacatcaatcgcaaggtccgggggatactctgcaacgcacccaaataatccttgctgctccttccgaggtggcggatgagactgttttcagcggagaacttgcgcggcatctttagcagagcgtcggcgacgctaccgccggtctggaagatattaatggccatggcacgatctttgtcatcattgctgatgttagcagtagacatatttccctccattgccgcctgaagagatgcaggggcatactgcagaatagcatcgcatgcgcccttgaaatctccctggagcattttgacaccgactgtatccgttcgggttgcgaaggttccaaatcgctggagaccgtagtagttgaagtatcctcgctggtagagattcttcaaagaagtaccgacgacctcggatgccttggcgatcgcagcctgaggatcgctcatgctcacgccgggaatttcaacgtcgcgcagagtaatcacgaactcatttccctgcaaatctccaaggtccaggccatgcttgcggtactgaaagtctccaatacgagcattgcgaagttccgagttcacttctacaagccgggcgaggcgaacgcgcacagcacaggcacgctgcacggtcacaccccgcctatccttggttccagcaaattggagagccttagcattcatcctcaatgagcgagcgatgtaattgatgacttccattgtgtccttgttctccttgtagatcgtgaaatgcagatatggcccgccgagttcttcccagtttgtccgctggccctggacccgggcgttggcgcgtcctgcggtcgcaccgcgttggaaacggttatttgccgcagtgattgacatatttccatctgcatcggtagtagattctagctgggaattgaaaatgcgacggatggcctggtggatcttggtgcgaaggtcccggtcagacacggcaaaggtgacactgccgaattcactaggtcgaccttttggcttagccatggcgaatttatggagcgcaattatttcggcagcattttgagcgccaaagtattcctccagaagagtgtggtcctcctccgagactttgatctgagctggtgtttccgcttccttggctggggtttgttctgcagcctgggcttgcacctctgggactgtcgacgcaggcgtacgctctgtaacagtatttacagagttgtcgggctcggtgatcgtatggatgcttcgaaggtggacaacttcgccggtggtcatgatctcattgaccataaaatctgtgtatctgcgcatgattattagcgcaattctcaagtggagtaaataatagctcacctcttcttcaggatacccgagaatccctcagtgttgctcacaaactccgtgataccgacctcgacttccttcagagcctgcgcatctgagactgcggtgcttggagtgtcagttgcgccattgacagcgatggcgacctcagttgaccctacatcctcagtcttctgtcgcttgcgcggggattccacaatatctggcttctccatattgtgttaatcgttcgtaatgagtggggttagatggagaaggttgagcttcaggaactttttctttaccgatttggattagcgtggaagggccaagtgtgggtcagccctacttaccgcattgggatgggaacttcatacttcacttctacatttacctcattgaacgtttgactctttcaataatcatagattcattcagagctgcctcaccatgtaatttctactagctctatactgtattcgatcataaccatagttgtcataatacagactaagatactcccgataccttcaatgcctcaaatggaattaatgtgttacaacagtggtgtaacaatttatcatcaatacacagaaaggactttaagtgccaaatctagaagcttttgaaggctagagcccattgtcgcgagctattataaaatgatcgcacatggacactcccgatgcaactactatccccaactagaccattgcgacgacaatcattacgcacaggtatattgcctcaatttcagtctgagaccatcgttatgaggtttatagtggatgagaaatttggtaagctacccacaatgatgattcgagtctgtgaaaacgttataatagaggctaattgtttcatagactccggtatgtgatcgtaggtataatgtgagagttaattcgatattctatagattctcaataatggtcatgcgtaagccaaaatgctgcataagcttacatcagatcgaatcgaggtttttcaaagtagccagacgaatttgaaagcatatatgatttcttatggaggtctaggcggtctatacttagaaagtcgaatagataccagagcgcaagacagaagtaaacatgccccagttaaagagccgaagcgtatattgtattcgaaggtatgttgcgactcctaatactctactcgcttcactcaaatataagacatccaatcccaatcacaaagaagccggtaaaggcaatacgcgccagaaccaggaaagcacgaattctaaataagacgcccggacagctgcgcatgcaacaaaccgaagaaatcactcaatctccgaccacagctgagaaggttggctgatcggacttgtgctctggaaggaaaccgaaccagaacatcgaggtataaaatgaaggtattcgcccgctgttctcgatatcaattctacaagaatcaaccttctatccaaaatcattcagtgagcctcattactatctcgcgttcataacaaaccgcaattgagcggatcattgactgtcatcgcatattagctcaatctaaaacaatgaagtctaacttccttatcgcgctcttcagcttggctctagccgctgttgctgcccctaccggtatgtcatcagctatgcggcgttgtgtttagtcgatcacttctgattgagtggccatgataggtcctggcggtagcggacttggcggcggcggtggttccggcggctctgtgggcggaggtggcggtggcggcggttcaatcggtggaggcctcggtggtggctttggaggtggcttcggcgctggttctggagccggtggtggtcttggtgccggtgccggagatgggatctaaaaaccttttgaggctggactaatgcgcttggcattgtgtagtcttgaggtggtctcctaataggatgataggactggcaataacagcttcagccctacttgatttgcatgtctgaatgtgtagtggtctctagagtacagttggctgtgaagtagaagtctgtatggtaaaagaaaacagaggaccaaacataataaaactgctaacgctcagcccaaactccattgtggttctttttctatcttccaggatgtggtgtgtgcatgatacatgggttgcgttagaataaaatgctctgtacgagacaagtgtgaaaaaaagggggaacaaatgttcaatgcataacaaaaacggacaagggaatggttattttacagctcatctttgggatcctccttagtcttgggctgatccttgcccttgcccttgctcttctcggcatcgggcttcttcttttctttagatcccttcttaccactgctgctgctcttcttcggctgaccggcgtttgcagtcattctttcgtacatgcggttaaggatgcgctcaaactcgcgcagccgcgagtcaacctccaaaacggtcaaagctgggtcatcagactcggaaagttcctcttgcagactgagctgggtttcgagccagggctgggtggactcgtaggcctgggtgatggccgtgaggtcagcgggagtgaagagggagtacttggggcctgtgggtttggccgtagcggcactcttagtagatgtggtagaagaagaaccggagtatgggtcttcatcgagatcatcgagatcaccgagagggtcatcagaagcggctggggctgggggcgatgagctggtctcggtggaggtggaggaggcgcttgaggctgagagggaagaggagtagagctgctcgtcgttgtcgatctggttcttgatcaattccttcatggactcggcattcttgagcatgtccttgagcaactgcacgcgggctgggcgagaagagctctccttcatccgcttcagtgcagggttgacgatggccttaaggtccttgagcctcgactggaaatctgcagtcttggcgttgtcgctctcatcggacagccagtcgctggccttggagactctctcggagagtacaactagttgatctggcttgactgcattgatgaactcctcgttctcggcgagatctcggctgcggtagatgaaagattccagttcattaagagcctcttcgcgcaggatgcgatcacggtccgaatcatcgaaggcaaggaggcggcccttgatgcgactgagctctgcggctgatggagccggagtgccaagcgtcacagacttcaagctgatcgggataacttcaatgtttacctgaggggtagcctttgcgtctttctttgcgtccttggtggatgtggtggtggtcttggaactggcggaggatgcaggggatgattccgtctcgggctcaagggtgatcgattcacgcggctctccatcttcgccgaggggctcctgctcatccttctttccaaggccgaagaagcccttgacgtcttcgacaattcccttcttctcagattccacctcgcagctaacggtaccagccataacttcgggaagaccgtccacagggctgagacggatcgtaaacttcgtggtaatgtttgcggtggtgcagccaaagttatccttgagcctggcaaccgacgcagtaaggttctgtgtctggacactgaggatgggctgttcttcatcctgggaaacatgctgagcgaagctgaattcgaaatcctccaggttcttcacggtgacttgcttctcaggaccgacctgggaagtggctgtaaacagcttctggtttctttgcttgccatctgagttccacttcaaggagatggggtacgtagcggcgtcaccggtgcgaatgtccttaacacggaaattggggctcaaagctgctcccttgaaggcggcaccaaagacagccgcttcatccgcgttgacgttagttctgattttcttagaagagccagcgaggctttccaattgcttctggacgaacggagtccgaatggctccaccgtgcaacacgacagattcgatatcactcaagtcaaggccggccgctgccaaagccttctccactggggttccaatgcgggcaacatactcagcagccatcttctcaaagttggcacgggtcagcttgtacttgaagttgatgttctcgtcgtacagtccctcgaagcttgtcgaagtctcagtgttggcgctcagaacctgtcgaagcttctcagaatccttccagagtctggacatagtctttccatgcgccttaatttcagctggtgtaaccttatccttgagtttcgtatcctcaaccaagtgggcgaccatgtcgttcacaataaggtcgttcagggagtcgcctccaagtgacttgtcccaaccagctccaacaacatgaacttcctggatagtcttgttgaatttgccaacatccttaaccttacggctctggaaccgcaaaacactggcagtcgtagacccagcacccatgtcatacacgatgtggtattcgggcttctcgccatcagaaacgctggggaaagtacggctggtggcgtagttcaaaccgacagccaatccatcactgataagagcctggattttgaaacctgccagctcagccgccaactcgaggctgcgcttctcctccgcggtgtagaacacagggtaggtaatgactacatcccgaacatcagatccctttccggccaacgtatcagcattggccttgatctgcttcaactgcattgccagaatctcctcgaccaagaaggcgtctttcttctgtgcctctcctagccggttgctgcggagagcaacagaaccgcgaccatcgggggcggcctccaatttcaacgcggggaacctgctcctataattcttgactgcctcctcatcgccatcgttgaatggaacgcccaacagagtcttcaggttgatataaatgtcgtccgggtaccgagctgccaaggcgagcgcatcaccaccatagaaccgttcggggaaaggtgcatcgctctctcttgtaggcttgaaagcaacagcagcggactccttgcgcttcgaatctttagtgaggacaatctcaagcggaatgccgggtttcacaagagtagccttgaaatattccgtgccgatgtcgatgcccaggacggccgatccggcggcagaagctgacccagcgaagctaaggaggaatacgagaaatggaaggaccacgagggatagcattggcgagctggataattgtcggcgatttaagaacgccattatctatgtgtaggctccgggctgccggagtcagccaaatcgtcgattgaaggggtttcttgcggttttaacagggaaaacatacccttttccgaacgtatatagacaaattgacagatattcaatcactctgcctgtttgccgaatcgtgtgtcgcggtttgggctagctttgcgccagatggatgatcggagggagctatgggatagctcagagattggtgttgggttggcgggtgggtggtgggggcggtgcttagaaaaggaaaaccaggatgactcgaaattaggccatctgagaccaaagggatactgtggccacttggcagtaacgtaacttgaagcctaaaagagctattggatgaggacacgggtcattatgcaaacacatcgggcgacgtttgatgtttgcactgcttatcgttatcgcattatgtcatagccctaattccaaatagggctgaattgtagaccagacaacttgtggatgttaatttataaccatgatgaaatgtgggtgtacaattaatgcaaataaacttcaatttgcaaactaatatatataactataattagggtcccataatcgtggataaggagcgtcaggtcgtcaggagacccattaataaccgccatcctggcgtctttcaagtgaatatgtcagaaacaaatttcttggatgttttcgttgtctttttttcttgcgtgggattatcgtccgatttctcgctagcccctgcccaaagcgatggcatcatatctcatctgacagatcaacttccgtgtagatcaattagagcagagcaaacaggagagccaggccaggaatcatggccacagcagacttctggagagctggagcactattgaacacaggcgaggaggaagcagggggagccgaggtggaagaagtgatggaactcgactgtgccggggcagtagacccagtagctgaaacaccggttggggtagctggaacactggactcggtagccggaatactggtctcggtggccgggacagaggtctcagtagccgggacagtagtctcagtagctggaacactagactcggtagccgggacagaggtcgcagtagccgggacagtagtctcagtagctggaacactagactcggtagccgggacagaggtcgcagtagccgggacagtagtctcagtagctggaacactagactcggtagccgggacagaggtcgcagtagccgggacagtagtctcagtagctggaacactagactcggtagccgggacagaggtcgcagtagccgggacagtagtctcagtagctggaacactagactcggtagccgggacagaggtcgcagtagccgggacagtagtctcagtagctggaacactagactcggtagccgggacagaggtcgcagtagccgggacagtagtctcagtagctggaacactagactcggtagccgggacagaggtcgcagtagccgggacagtagtctcagtagctggaacactagactcggtagccgggacagaggtcgcagtagccgggacagtagtctcagtagctggaacactagactcggtagccgggacagaggtcgcagtagccgggacagtagtctcagtagctggaacactagactcggtagccgggacagaggtcgcagtagccgggacagtagtctcagtagctggaacactagactcggtagccgggacagaggtcgcagtagccgggacagtagtctcagtagctggaacactagactcggtagccgggacagaggtcgcagtagccgggacagtagtctcagtagctggaacactagactcggtagccgggacagaggtcgcagtagccgggacagtagtctcagtagctggaacactagactcggtagccgggacagaggtcgcagtagccgggacagtagtctcagtagctggaacactagactcggtagccgggacagaggtcgcagtagccgggacagttgatttcattagcaattgaaatttgtagaatagtcggagcttcattcacctgggcaagtggtagtcgtgtaggtagtagtcacgataaccggggtaccaggggtctcggtctcagagggagcggtcacagagggagtggtcgaaacaggaagaggtgtggtgggaggagtggttgaagcgggagcggttgtaggctgagtgcaacccttagtacaggtgacaacagacgtcagggtgatcgtgttagtcgcagtcacggggtgggtgtatgttgatgtgccacttgtgatagtactccatgtcactgatttcattagcaattgtaggatatcatggaacactagactcggtagccgggacagaggtctcagtagccgggacagtagtctcagtagctggaacactagactcggtagccgggacagaggtctcagtagccgggacagtagtctcagtagctggaacactagactcggtagccgggacagaggtctcagtagccgggacagtagtctcagtagctggaacactagactcggtagccgggacagaggtctcagtagccgggacagtagtctcagtagctggaacactagactcggtagccgggacagtagtcgcagtagccggaacactgctctcggtagccggaggaatcaccacgataggagttgtagaagcatcagtgcaagtggaaacagacgtcacggtgatcgtgttagtcgcagtcacggggtgggtgtatgttgatgtgccacttgtgatagtactccatgtcactgatttcattagcaattgtaggatatcannnnnnnngcaggcgtcacggtaatcgtgctcgtctgagtcacaggatgggtgtatgtcgacgtgccgcttgtgatagtactccatgtcactggttttattagcaattagaattgatagaataatcggaatgtcatttacctgggcaggtagtggtcgtgtaggtagtagtcacaataaccggagggggagtgccagtctcggtcacagagggagcagtctcagagggagcagttgtgggctgagtgcaacccttagtacaggtgacaacagacgtgacggtgatcgtgttagtcgctgtcacaggatggctgtacgttgacgtgccgcttgtaacggtactccaggtcactgattttattagcaattggaattgatagaacagtgggaacttcatttacctggacaggtggttgttgtgtaggtagtggtcacaataaccggagggggagtagtctcagagggagttgtaggagcgggagtagttgtaggctgagcgcaaccccctttagtgcaggtataaacagatgtcacagtgatcgtgctagtcgcagtcacgggatggctgtacgttgacgtgccgcttgtaacggtactccatgaatttattagcaattgtaggatatcacagtcggaatcttatttacctgggcaagtggtagtcgtgtaggtagtagtcacgataaccggaggaccaggggtttcggtctcagagggagcagtctcagagggaatgctagaagcaggagcggttgtaggctgagtgcaacccttggtacaggtgatagcagacgtcacggtaatcgtgctcgtctgagtcacaggatgggtgtatgtcgacgtgccgcttgtgatagtactccatgtcactggttttattagcaattagaattgatagaataatcggaatgtcatttacctgggcaggtagtggtcgtgtaggtagtagtcacaataaccggagggggagtgccagtctcggtcacagagggagcagtctcagagggagcagttgtgggctgagtgcaacccttagtacaggtgacaacagacgtgacggtgatcgtgttagtcgctgtcacaggatggctgtacgttgacgtgccgcttgtaacggtactccaggtcactgattttattagcaattggaattgatagaacagtgggaacttcatttacctggacaggtggttgttgtgtaggtagtggtcacgacaactggaggaggagtaccagtctgataagaagtcgaggtaggagtcacggctggagtagtaggaaccaccactggaatagtagtcggaaccactggggaagtaggaatcacgactgaagtagttgtcggaatgactggggaactagtgggcgtctcggtctcggacgaggtagtctcggacgaggtggtctccacgggcggaggagtctcgacaggcgcaggagtagtggtctctactggaggaacactgctactgtgaccaccctgacctccgtggttaccccaccaagggccaccgccatggttaccactgccgccgcggacggcaatgcgaggctcaccaacatgtttgggagtaatgactacgccggacgccaaggtcgcggcgtagagcagaacgatcggaacgcctctcatcttgactggcaaacgaatgcttatgtgctgagatagatagggctgatatgctccttggaacgaaggacgacaggaaccgtagcgagagagttcctaaacaagcaatataaacaattgaaataattgaggacgaaggctgggagagattgagaacatggcaggcttatatgtagctcgggggtttggtttcctcggggccttaattcctgtccggttggctcactcgatagcttctgttcggttggccatgggctagtgtggaccacctggtaccccattgtattgggtgctcaaaacaggaagtcgaaaaaataaaagtggcgctcatattcgaaagccaaccagaacgggcatgaacaaccagtattcagcagtcgacccgcatattttccatatttccaacgaagaagatgtatgtaccggaacaggcccggttgactagacgaccaggtacaagggttaagccaatgagaacctgtcggggtctcagcgattggcgtgtagtttgccaaactcgaaaaagttgaaatatgacaaagtcaaagtgttcagagcccgatgagcggatcagccaatggactcggatgatgtaggttgtgtcttggcaatgcgggagatagctctgggatgtcccatcacggcatagagtacgtacctatatttggttagggtttgccagtttctgctgttcttgtcttttttttttgtctaatttccttgtcttgatacttcatgatatcaagtctagtagtagaatgtcttttatacacatcatgaaaccgagctatgaataactcttaagtttggcccaccccatatggcccagataaaagtgtggggaagcgaaacctcacgaataatagtgaaaattcaaactgggcatctatgtactttgtatagataaaacaagttctcacgaatcttagggctgtggggatcaaaatcggacagccggaaatgaatatcagtctagatttgggtcagggtctattattctagcccaggcggtgatcgcaaaatggtttgatcggtgtttattctgcgatagacatgcccctgacccaagtatctcgtaataggctgtcaaaagcccagcgcaggccaagtggaccgttgtgggacaggccctggcattttctccaacaaaacatgggaagttctgcggtggggacttttatggagacttggtgatgtcaacgtgttgtccttgtttttcctctttggctttcttttgtattctttttgttttctggtgaggaattaatttactggtattgatatgtgacgtatacatgtacatagtatgtaggactgccctattcttacagtatcataaggattctctacaatcccggtccagactattggatttttgaatttcaaattggactgatgacgccctcgatctttctttgccaaaagaagaattatggcgcgatatacggagaactttggagaatatactctgcccctgttactgtgcaatatactccggacactgcataggcactgcatattacttgcatagttacacgtagtcacacaacaaggggcgttagttgttcgagtccttccaaggtaactatattgtatgtacggagtacatacaatatagttacaattctttttgataaagaacgacagactcgaccacggttcggcaatgtgacgtggggctattaccaaggaacatatgtatatctctgagtacggcgtatccataatggaatatatgtcttaaactctccaccacaatctcggaaaagtatctcccaacaagtccccggccttctcaattgcggagagtgagattattatgaagaggctggtcgcattcccttgcaaccatgcatagtggcgcacatgtcatcggaacagataacgagggctacatggaaaatgtggggtgatacactgaaaaagtacaaagtgagcctgaagccaccaaatccttctatgtctttttttctgtggaacaaccttggaattacaaagtggtatcgtacactccgtactccgtaactatattggatctgcgtaacgggaggtaattatcgcccgaaaccggatacataccctgtcattctttcctttttttttgattgcgatgatatcaacatatggtgtagctcttatctagtcgtcatcatcgtccgagccactactccaccccgtctcgtagtactctcgaatctcgcctagtccatttaccaaagcctcacgctcatcgaccgagactagacgtgcggcacttgccgagatagtcttgatgctctgagctgtccgggtcgaggcggtcaatgcggtaaacacatttactccagtacctgtctcgggggtggggaacatgtcatgcgggaaactgtcaagaataggcatgcggagtggcgtgtggaacctattaatggtgtagaatgtgagtcgcctggctgagacatggaaagttagtgcgtagaacaggaaacctacttttgcaacatcgactctgagttgtatctcctgatcttgcgacggtgcccaatgtccctgtcctcggtggactcgctgtccctttgcggttcgtctccgcgggtgacttggacttggttgaagacatgggcgccttttttgtactccccgtcataggcgaagtcaatgtcaaattcaatttcggcttgcgtcggcccgtcttcattggaggcttccttggtttgaccgtcattgattttcattttattaatggaggattgtaattcgaagatggtgtgcgtgccatcttccccagcgagagaggcctcgaaatgctgatatggccgcaatcgggaaggcagcgtgaccgtctcaatcgctgagactatcagggctgttttctgccattctgattggcgatcaacatggatatagccgggcagcttatgcggaacgtcgataattggagaatagagcgatgccagttgcgagatcgaatgaagtgacctggccttgttcgtatccttcttgaactggtggtgctttataaagttcgaaacttagccaaccggactcgcgattcttcaaaatagcactgtatgactcacccgctgtgtcttggtgccgtcctcaatagcccacacccaaatacttttctttccaaattcatctctcagtcgttccatatactgggctgcgaatccgccccaagcatcatcagatccggagaacagttgcagcgcccgcaagtgatcacattcttcaagcagaggtctcaggtcacggtccagcaggtcatgctccttatcaaggtctttgaatagttcttccccgacattccaatcctcaaagggcatgttctgggagtttaggtcatattcgtttagctggacaatagaccttggatgatagaacactcggttgtagtctgaccagtagcgtacggattccgaggtcaggcgagggggttgagtgcccagatccaagcttttctgatattcacttggttgaattggaggttgcttttggactatctcttgtccatccctgccagacgttagtttgaaaaacttgttcatcaatttaacttgcataccataatccttgacctgctgtggagtcttcacttagctcgtaaagtgcattgtaccggcgcaatgttccaaatccgcccttcagatcatagattactgtgcgtggggtgtaggtttcggagccatctactccaacacccggtcggaaatgaacatcgtgatcaacatctgactgttctccatcataggtaaagtatgattcctagatatatatcagactgaagttcatatgtgatcgtggttgacagtacctgcaggttccaaaaatgtgttgctagataattagcccgctgaccaagctgaagtgtaacgatttcatgcatattgatggacacaattgacacttgcagtgtagcccctcggtgaattttgatatcgacaatgcccgccaaagacgcacagacataaccaaaacatgacgctaggccggatgtggggagtaccgcacgtgagtgactaaccacatccgggaaggtgctgaaaagtcaccagggcaacagtcacatgatccttccaaagagggaaataaacatgtttctgtgtgcgtcaccactttaactccacaacggtgattttccctcgtgaatctcgttatttctgtgatgattctttgaccctgtgatcatcctcggctggatccactacttgtcaagcatctgcgatggagtccccaacacgtcccatcctgagcccctcgaaggcgttgaatccggtctcaccggaacgcatgaatcaacaaaccatccccccctctccctcactaccctctgatctcctcacattacaccacaagaggactagaggtgtttcggaagtccaagccaaagtggcatttctcaacggcctttctcgaggagggaacactgccaactctgcatcgaacaatgccgctctacaacgcgctatgctgggccgcgaggaagccgagtccgccctaaccaccgcacaagaagatttatccgaagcacaaacacgagaacgccggatcagtgaacgcctggaatcattgttggaagagctacatggtacgaaagaacgccaggcccacgaacgatcaattttcgaaaaagaaatcagaaaagcccgcaaagaagcctttcgggctggttcaaccttggtaaaacttcaagaagaattgaaacactcgaaatcagacatcagagccctgaaggaggagctgggagcagaacgcgaggcaaaggacaaggccaagcaggaggcattcgaacgcgcctatgctcttgctggtcttacagaggaactcgaagtcctgaaagagaaattccgtgccctcgaaacagacaaccactcgagcaccctggaagtccgcgcgcatgagattcggagagaaaacttcggaagactgtcaatagcagaaggcgatctcgcgtttttggccaccccgcgcagagcgaaacgagccgctacaggatctgtcctatccccagctccggcacgcgaagaagaccacgcagaagccactccccccaaacgcccacgtttgtcggattgtgcaccaaaagcggagagtgaaaaagttacatccgagaaggctgctgaactagacgaggatatgttggaggagattagggaagagctaatcttcgagcgtcgtcgcagagtcgcagcggaagatatggtgcatttcttgaacattgagtgccagttcgaacgctgctcttgcaggcttgcagagagccaaggtcgtcgctacatttacgatgctgagtactataacaaattccaaaagcctcagatcgaggcggaagcaaaagctcgtgctgaacaagccagcattcagaaagctagtgtgcaccaagtccttcctcatccagcaagcactcccgaggctagccctccccctcctccacctcccgttcaccgatcacctgttcaccaggccaccactcaggtgagatctcctcaacatagcgttcaccaggaagaaacagagtcaagtcgtactccttcagccgcgccacctgttcctgtgcaccagcacaccgcgcctaccatgaaggctgaacctacggatctccccaagatgcagatgccagaggagcccctggttacattttctccagtgactggcacattcacggcattcccatctcctctccgagataatgtcagacctctgcgattggacttcttcgacaaacccgatcgagccgagcctcggccagatgtccacgcaggtcatgccgatgcctctgcatcacccgacttaggaatcgactcgttcaccccctctggggagcctgccccgaccagaatgccccgtcccaccccatcagatggtgccgccgaatgcccgcgtgtaccactgtctgtggaagcaagaccgtcgagacgtgtcgagagagagccctatggctaccgccagcccattaaccccccgaagagagctccttcccgacaagagccacagtcacagcgcacttcgcaccctggcgttcccgatacgcctatcgaccgcgaacaagcactcgcacagatcagggcgcgccgaggccgcacccatagcaagcagcgatcagtcagtgccagtgagcccggcctcgcagctcgcgcctcggcgggatccaacccgacttctgctcggggacctagacgtgttcctaaccccagtcttcgggctgattcgaggaccgagaaagaacttggcgaacgccgagatatgagtgctcctgttcggatgttccgacgttaatgaatgccatgggacgtatgtctcatgatgcatatttatgtctttcttttgcatagtctgccggtgcttgtcctttcctctaatacccccggcgctgcatcgatttgtgtttatttcatttgcgtgacgatcgaaagcaatatgctctgttttgtttgtgtttggatcttttagctccgatgtcatgagcctcagtatactatggatttaatttcccaactgcatgtccttcttttgatccactggcttcaagtgtccgtccctcttttcacatttcctatgtctcatttttcttcttttttacatagatttcgcttgggagtgaacttcatcttatcatggtcagtctggaatcaaatgaaccattaatcatccaccgatatatccatgaaaagatgtaactatattggcctacagtacataatctatgcctaacaacaaacaaatacctccatggagatctcaaagatctcaaagatagaacagtcgcggagagaaccagcctctacaaaaccgagatcccacaacatctaatcctcgcactatcaaccttcgcgccacgaccccaccacaaggaaaccaattcctcaacaaagactcggtccgtcacactccacacatcaagccccatctccgccatatccgccaccgtgatggtgacagtttcatgcgcaccggaatcccggtgaccagctctcgacccatgactcgcagacccgcccgcgctcgaccgctgccggagtaaaggggaattcccctcgtcgccatggatagactgccgagacatggagagcgaagcatcgataatatcatcatcatcgtcgatatacggcgcatcattataggcgtcaccgtcgaagtcgctatcatagcgcgcgatggcgccagccaacgtaacgaagatctgcgacgtcaggcggcggaagtacgcgaccagcgcaacttcgagcggctcctggccttcctggaggggattgcggggtgcgtcggagtgagagggtgggttgtagggtgggcgggcgatattctcgatgcttgccagaaggcgggagtcttgttctgcctgctgttcttcttcttcctctgagaggccctcgcggttctcgccggcggaggcccaccagatgaaggaggtgtaggcaaggcgggtccaggagactggctcgacgatcgggctgaaggagtaggctgagtctgtgtctgaggggtcttgttctggggatgtggggtggtcgttggagaattggcggagtccgcggcggagcattgagtagcggcgggcgtcgcgctgggttgcctttagctggatttgttggatttggttgggtttgccgcctgtgtgatggactagggagattttggggaaggctcgctcggcggtttgttgtgaatatggcgtggggagggtgatgaggacgtcgaagagatcgggtttcatggataagacagtatctgtggaacaggcgatccagcttgggtctgtttcaaggtctattatgctgcgcgacggatcgaaggaggagaggtaggggatatcatggatgccgacgttgaagaggggacgggggcgtagtggtggtatgcgatcgtcggggagtagctgtaggagggagttcggcaatgaggctaagagagatagatcatatactggatctgaattagcagcagctcaataacaatgcgcattggagcataccgtagttgcaagatctgtgtacaggagcctcgcccatgaagaggatccgcttgcgcagcaaagctgctctatagagggggaagatcaaaggtccgaagcactccgtgaactctggaagcgatgaagcggggtggaagggtgtcaaggccggcctgaacgtttctagtggcattgcatcgctgaaggcgcggttgcgactcgagtgatctagtcggtcgccgggtcggaaacgaagactaagaggcgagtcgaggggggagtcaggaattgaagaatcggtccctcctattctatacgtctcccaataatcagacagaaactgcgtatccgacatgttctcggcgtatttcctatcgaagaccattgtcagtcgggatctcccatcctgagtgcctggatatacgaacaacgccagttccttgagtcttggagcgtgtcgccaactcttcccaagtcttccggtgctgagaggcaccagaactccgatcgcaaacatcttcgcattgcgctcggcctccgtggcggggtgattgaggaacgcgctgataccggcatactgttcatgaacgaagtatctgaaggagcgcgtcagcaaagatcaaatccaaagctttcaaagacgttcaaaaacatacaccaggtcctcagtcacattgtgtaaccctgagggcagtgatttgtattcaacaaccccttccacctcaactgttcactcgggagtcagtatcgcgcatcagagcaactgcagccgcggctagataattggttgctcacctcccggcacagttcgcttccacgagaccacatatctgttgtcgcataatgtcagcgatagttcctgagcttgagagctgcgatgcccaggggaaggtgtagaaattacccggccctgatgtcgaagctgatgacgaacaaggcggcaatggctggtggcgactccatagaggaacgtgagacgtcaatgcccaaaggcccaggagattcagataccattctcaaggataatcatgggatgcgacgccattcaagcagtgtcggggaatcacggtaagttgaggggtgagcctggcaaaggggaccttggctattcgaagttagcgcctcaggcagcatctcgggatctagaagtcattgacttcggataaaccgaccattcacggtcttatgtggaaatgtaacccacagctgtgtcgtaagctgtggtctcggcgtcgttcggggatcgtctgtataggttgttgtggaattctaactccggttcttcttactcagatatatcccccgctcagctatctagaggaccaacgccaacatctaccaggcatcatatcaaagaaggcaactttttggattgcaaggaaaatgcgtttctttcattttctcctattatgagagatgcccagaggggcgggctattgattatactactccaatctcgagaaatgtgtctaccataccatatagatggcctccctatcccccacggggccccaccattacgcgttatcttcacggagacgcgccagtttctcctggtcaaagataccaggacccgtgagttcgttcttcaacgttgagatagaaggcacgaagaagtattctcctcctctttggataacccagctctctagcggcatgcgggcctcggtgggatatttgccatcaggaagaccgatagagcgaggcgggtgatggtctagtctctggcctacaaacgcatcaatgcccggaccatcaccaccgacgaagtgagtcttgcggtcagggaagtggtgattgcttgcccagcctaggagaatcaattgttagtggggggctctttgtcacacatgcatgagttcaagtttcgactgcttacgggtagtcaggaagttgaatccattgcggatatcgctctggtagcagacgaacagaagcccacgttccttttcctcagaggactttcggtcagtcatttcttcagccgagacttcctcgccatacggaatgccacgacggataataacagcatggtcgtgctccaagtcagcccgtggtctcattttgcgggtgtgtgccgcaaaggggcactttttgtgctcctcaacggggtggtaatcgaagttgtttgatgagaagagtttctcgtcagagtcatcatgaggagactcatccacgggggttccttgatattggtcagcaaatcgttgcgcgaacttcaaagattctaatttgcgacgaaccgttcttccatcttcccatcaagtatgcagcaagcttttcggctggcttggggtggtcttgagtaaaaggggcgtgcatagcgttttcctccatgaacctatagacttgatcaataccaaatagcaaacaatacaataagaagaggtcacccactcgtcaaattcaggaacaagttgttgaaggtcgcggaaaacaaggaaactgccatctttggcccatgctggttggcccatagggtcgccctcatgtccgcaaacaatcaatctgcatttcatcagtctgagagtccttcattcaacaacggcgagcacatttaccctgactttgtggccttgggctcctttcccacgggttgcctttcatcccagccctcaattacaggctgactgattccatccttgaatccgaaactgaatataaaggtaagtttggccggcaaagactcctgaggttgataagtacttactgctcttttcccttcatagcgcctgggcgaacctttccttctctgaccagtgtgaactctatagaagggttctggctgagtacatatgtatctgggttgagaggtactccctcctcggccaggaaatgttgcttcacctcgctgaccgtggtatccaaatcacgcttcaggcttgcggtcaccataatcacaccatcaatgagtctctcattatcatcggtgggcttgtattcctttcgaagctcctgggggttatcccacccctcgccgacaagatccgcatacatgcccttttcgaacaatccaccacggagttgttgcttccggaagactgttgatagttgcctgtcttttttgacgaaagtctgatcattggaattcacaaatgctccaagctatgagtggtggcttatcagtatttgttcaatctcagtgacaacagttggattgataacttactgcttcaagaccggtcgaggtaaaggcaatgttgattcccggtaaaccttgaagcttagctgatttttttgccagttcggcctccttctttgcccgcttgatggtctcacccatctcacaggcatcttgcccggtggtaatcttgggaataaatgtcttcagtcggttcttgaaatcaacttggtttcgaacgcgaaaaaagagaaagctttgaaacctttttgggagacccggcctgatgaaggtaagtattttgaaagaccatgccgatatgaatactcggtagcatggaaaactcaccaaacatctccttggatatttgccttgatggctgatgtgagactcatgatggaaggtcggactcctcaagagtatacgatctgatgtcaatgaagactacgaacgaacaagggttgacttgaggggacaggatttatatgagaaagacggtgggtacgccatcttctgacgcagcaagaattctatttttctaacaaaaaagcaaaggaaggaggcgggtctgtgattgaaccgtagcattcagttactggatcagatcgtccattagataggcatattcgacaccggtgttattaccgagggagttctaatagtagtgatcgatcatagccacattcagctatacgagcatctccgggggagaggggaagggcatacgcctagagatgcgaactcactgccccacaggtcattgctcgaatgtatgtattcctaattcacagatgattatagggtttcgtttcctcgatgctagagatcaacatggcccacttcccagttacatttgagtgtgggtccctccaagcaaatgagatggcatattttagaatatcacgaacatcacggttcctgggggcttgtgcggagtactccgtgctccatacatataacacattgactgcagtagtggagattgcagaatatccatatccggcaatgtaggatgtacatcgttcagatctctaggcttcagccgtgatccacctagctgaattcgaataccgttcatgtcgaccgaaaattttagtcaatcaaaagatatgctacaagtcatgactgtcgatttttcgggtatgaatgtaacatgataactatgtagggcgctgctgacccaacagcttgaaaatggaaaatcatgaagttaaaggaatgtggggatagctttcagctttccacttgacaaattgtggactcatattgtaatagctcgaggaacgacatatgcagcttacatctgcaagaagctagtgcataggccggtgtaatacccagagagactcagctgaactaaacttccacctttgatgtcacgagaagtcctcgggagctgattcgctgaagattagtctcagcggaagcgggccgggctccaccggaattgccgctagcacgaactttctccggagacaacattgacgttcctctctcatgatcgacatgcagtaaaattacactcgatcagagccaattggtcaatcagagccatgacgacaagttctgggtgcaaccttggaagctccacctataatatgcaagctaggaataacctcacacctgggaacagctgaacttgtacctatccagttcggggtgggcttgcatgccgtgtcttctgcaggatgcgccgatctttgactctgcccgagcatcgccgatcgggtctaatttttggggattttcttcaccgatctaagaaggagtgcccactcacgccgtactacgcaaggtggacctagacaatcattgacgtctatctctcatgctgatcttcagcaatgccgagatagacacttgactggtggcaagcagccccacatttcctctatgagatcgggcttattgtcatagtttgcgtaatattggcataggtcactccgtgctgaaaatcacttagatcctgaatgacagcatggatccagccctggcggagtattccgagtactgcacttatatgtacccttgatcacgtcaagatttctttttgcacagatgaagtgagccttactttcctcttctccttgacattctcttcacactccgataaatttcgcccaatatgaaacttcagtgggccgggctcctcttcggggcttccattgggggagtcaatggcatggccgaatacatgcacgaagctatgagaggagagcgtgtctctggctatggaaaacccgacaacccctcctgggtaccgcagttcaaagatgaatctcctccgtatcaaggccaccgaatctcccgtcaagactggaccgtgatatgtagcagctctgctagcggctacccatgcaaacatgcgatcgatggcaagaacggtacctcctggcacagtgacccctccgaaaagggacatactttcgttgttgatctcggtgcatggtaccaagtgggcgccgtcgttgtccttcctccaattgatacggacacggaaggcctcattacccagcacaagatatgggtcagcgaagatcacgagagctggacggggcctgttgcgtatggaatgtggcccaacacaaacagacagcgaatgtctgcgtttgaaccatcatctacccgatacttgagaatcacgaccgatgccgacaaggaaaacccctgggtcggtatcgctgaactgaacatctatggaactctgtacaccattcctcgtgaccctgcgctgggtgtctggggaccaactcttgatttccctattgtgcctgtcgccggtgctcaggagggatctggcatgcttgccctttggtcgtcatgggccgatgaccagttccactctacgccgggaggtaaaactgttatgactcggtggaacccgttgaccggcgaggtctctaagcgcactgtcagcaacacccaccacgatatgttctgccccggcatttcttatgacggcactggcatgatggtcgtgactggtggcaacgatgcctccgagactagtctctatgattctgccaaagatgaatgggtccgcgcaaccgaaatgaaactccgtcgtggataccaggcgtctacaaccctctccgatgggcgtgtcttcgtcattggcggttcgtgggctggaggttccaacgttgacaaggatggcgaagtttacgaccctgctacccgaaactggactatgctccctgaagccaaagtcagcaagatgttgactggggatatggaaggtccatggcgagcggacaaccatggctggctcttcggctggaagaatctgagtatcttccaagccgggcctagcaaacagatgaattggtactccgctcacgataatggtagtgtgaaggcggcaggggatcgtatggatgatgatgattctatgtccggtaacgcaatcatgttcgatgccgtgaagggaaagattctcactctcggtggctctccggactatgataaatcgtggtccaccaacgccgcccacattatcacgatcggtgaaccgggtgaggagccaaaggttgaaccagctggaaacggcactatgcactacgagcgtgtgttccacactacggtcgttctccccgatggaaaagtcgccatctttggcggtcagcagtacggcgttgcatttaatgaggaacgtgtccaatttattccggaaatctatgaccctgaaaccaacactttcacaaagttacagcagaacaatgttgtgagagtgtatcataccgtgtcaatcctccttccagatgctcgagtgttgaatgcaggtggtgggctctgtggcaattgctcagccaaccactatgatggtcagatctttactcctccctacctcctttctccttcaggtcagccccggccgcgtcctgagatcctctcgggcctgccagatcataccttggtgggcagtaccttgcgtttcaaaacctccggtcgtatctccacagcttccctgatccgtctgggaaccgccacccatactgtcaacactgatcaacgccgcattccacttgatgttactgctacatcatttttcaggaatacctggaaaactaccctgccagaagattcgggtattttaattcctggatactggatgttgtttgttctggaccggcatggtgtgcctagcatcggcaagatcatgatgattggcttggatgacacgaagaccatccagcctgcgcaggatccgctaagcgtgatggaggaacagaacagtaagcatcaatcactccgaactttttgaaatcttggagactaacactgattttacagacattgggacattcatgaggatcgagttgctgagaagaaagtggttttgaggcaagctggcatttttgaagagtccgaaggttgacatagcgtcagcattagttgcagtaattatagtgcatagcagcttcgtatacctataagagttgaatttgaaaagtcaccttgaatactactgctttacatagagaggaagtagtaggatgccagtctaccaatatattgatattgcccttcgtaccgctgcgctgtcctcgactgtcgcatacagataaggatactagtccatagacatctaccaaacgtggcgaaggaattagaacacgtaaatgctatgtagggaacctctattataatcctaaccaataatattcatactccttgtaagaagcgcgattgccatagagtatagctcaaaaagtccaagggtatccaccttacatatgaaaatcgtctcaagttgagtttatactaattatgtcgggataatggagctatcctttccccttgtaacgatatatagcatcaaaatgggtatatcaaagatgctgcctggtcttgactggatcagaagggatactatcaccatccccaggccttcgatcctcataagatatcgtcacctcgttgacttgatagataccagtcgaatgaggacgtggatgaggcagaatatgtctcgtgtctgtgtcttctccgtgctcttcattcctcccactgctcccagactcatcgtcaagatctttgccatgcacggtagtcgttgtcactgtatccatagcaaaggtcggttgttttacgctgcgtccggcgctgctttttccgtagggaggaaggtcggtgtagtttgaggcgtcgttggatgagatgtcgccgcaaatggagcgccagagagggcgaagggctggaatgctgacacaaaggatggtggtggaaagttcagacatggtccatatcaccgagtcggttgtcgcatctattctgtgattagcttgttttcgccgctaacagacaatggattccgaaactcacagagatagtcggatgattgtgttagagcgttgagacctgttgttcggattataccgcaaattccggcgctgtgaatatgtgttagtatgataaaatggaaaggcaatggatcagtagccgaagaactaacaaaatacccagactcaacgagaaacaaatcgtgtatttctcctttttcttcatgttcaaattccacaaggccaaccatgggaagagagcgagaacaaagtcaaggacggcggaccatgctagaaatatgttagaacaactcaagtgtaggttatgcttggaaagagaagaaagcataccgcacatgattgtggccatgaccgcgagattcaaagaacagcctttactcggaattcgcgggtcccagatcgactccactggtgtacattgtgcgaacacagtaacagccaggataatgctaagaaccatgatactgacgatccaaaaccagaggaagagtttgtgcctaggattaatcagtcaaggtcctcgaacttccagtttaaggaacgtaccattttttgacgacaatccgcatgaggaacgcagcgacagcgcacttgctcaaacccatgctaattgctataatactttgcccagccaagagcagtaacattccgtgggtagtctgatcgacagaaagttcgcctgaatgcacacccatgccataatgcgccgctgctgtacagagggctgtaaaggcaaccatcaaaatctacaagccgacatgacaagttagcaaatcagtgcaagagctatggatgtctcagaagagctcatacccaagaagcgagaagcagtagatcatcccaaccagtattgcggcggatcacagtccgtgtgtagactcgcagtgcaagcacaagcatacacaaagtagtttcaaaccaaagtactccaaccaacgttggacccttaccacggagagcaggcatgttggatgtggagtcaagattcaggaagcagacacaatgacatccatcattactctgttaaatataatcgagccaccagagggaaatagtaaccagaataataggggcccggctaatgatctctaattatgatctattgtgattgcgatgatcgtaatccacttccagctaggcctaacggctgaccatacttcgtacctttgaagctttaaaggtctgaaactaaaaagaaaagaattaaaaattcgtcacggacaataacaaggaaatcgtttccagtggtatggtacgatggattagttaagataaccatactggcgggaatagctcgctcgattttattcttcagcttgaatagatgattcttttcagctctgggtgtctctatttctgcctttttgccctgtagttctatgcaattcgacgtcttcattcctacacatctctctcaacgtttatcctcgtcacattttggattgctgcaatgcaataaaaacatttcaaattctttttgaatatcgttccggagcccatccgcactagtgacagggggcgagttgaacgatatatcacacaatacctttgtggatgtcaagtggatatgtacgataatttgtagggttgcaattggttcggccctagcggaaaagaagcatcgtgcttctcctagtctggtggtggtcatagcccatccacgaggcgacctttcccgcgttttaggtgtatgtgcaagccagatcatgcactgaaatagagtgggtcagggcatcgcattcgcatacaagtcttcttatcgggaagattccgagtgatttgcggtttgattaacagttgacagctgggtgccgtgggtaactttcttgacatctacctagtaaggaaaggaacgctgttgccatatgaataacggcatgtcaaacgaaaatttaaattaaagtggagggtcaattaacgaatcatctataactcagccgtcttcgtaagttgtaggtggttccagttgacggggtcttatgcgggtatccactatacctccgtgaagtctcagatttggggaggtcagttggagtactccgtttgtttaacggagtactccatacatatcatatacaatcgaattagcgtattcatttgatatacaacataagttgaagaccctcctttgctgctcgtgacctgcctgagattgtaggtgtaccttcctaattgggttccgcttcttggcaactgctcgggcctaccgctttccccaccgccttatactgtacggagtaataggtcggacaacaggtgcccgcactttatatgtaagccgctagcgaaaatatctactccggagttagttctcccttaagtgctccaccaactattccttcagaacaggaatcgccacgagtagacgaggattacgacacaacaagctttagaagttagtatgagccatttttatactcaaaattcaggcttaaagcttaatcagagtggcagaatacatgggcaaagggaaggagagttataatttggaaggcacccccgaggtccgtatctcgtattgtaatttatttcaatgggcgtaataaacacattttattagttttaacaataaaagtcaatcacttccgccggctctgattggtccaaaaatcattatgaatcctggctgagcgtccacgtctgggtcggtacggggtggatcggcagggccatgccgccttgggcaagccgcgacccgtccgaaaggttgagctccacttcttcgtataggtctcagaatatcccgtaaaagaaaaaagtacgtgatagcgggattggctgagattagagaagacgtggcaaatgatgatatcgaattaaatttgtatagctatatcagcaatagaaagttgaactatgcgaacggaaagcaatataatccacgtatatacacctcaattgatgcatcagtcctggatgtgaccattttctgcttagactgtgccgttcgagctagtgtcctcaacatcaagtgcatcctgaagctccatctcgacgtggtcgccgaacttagcattgatctcctcgagactcagtcccatggtctgcaggggaaaaaaggttagattggagtataacggtgcagggacggaaatcataacatacctcggggaaataaaacatgatggcaatagtgcttgcgacggtaacagcaacaaacaccatatagaacttccatccgatattgttgagagccagtgtgacaggcgcgctgtatgcgacagcattaccgaagaaactgaccaatgcaatggttgctccctcgctgcgcaggtgggtcggccaaatttcggaaccatagacgtatgcggtacattcaatggtggaggtgaagaaggcaccgaagatgaaataaatagcgacggcgccgttgattccaggtgtgtaggttgtgtggaggtagtacttctcgagagcggccatgacactgataatagcggcagagccaaatccaccgatgactgtgaatgtggttagtataagcagctcaacggcaaaggaatccaaaactcacccaacaacttgactcgtccaatcttgtctaggaggaagatattgattccgcaaccaatcaccgcacacacagtccaaacaattccaagtccaagttgcatggtggtaccaaagcccagtgcacccatgagggtaggaatcaaattggcgatggcagtgatgccggttccctggcccatggtccacaacaggatggcgcagagagcgcgcttgcggtgagacgctgtgcggataatgtagagatatccgcttggagtattcttctctgcaacgacctgggccttgatctggaccgcctcagcatgagcaaaagtacctctagggtcccgcttggtacgatgcagatactccaagaccttcttagcctcttcatcacgtccctgttgcatgagccagcgaggagattcagggatgaagcaaagtgtcgccatgtagataacacccacagcagtcagaacgatgaagataaaccgccactgcatctgagtgttgacgaagctgaaggccagcgcgcaaatagcggccaggatatacgccgtcactgttcccacaccgtgcagaccgaccagcattccacgtgtgtgcgggggcgagatctcactcatgtacacgggcgtattcgagaataccatacccgcaccgacgccgcagatgacacgcacgacgataaacatggtggcactgaccgaaccggcctgcaaagcacccgtgataatgacgatcagggcggcaacggcgttggcaattcggcggccgaacttgttagacacgggtgcctgcagaatagcaccgactagggcgcctccgaggaaactagcaagatatttttagctaaagatgcgtttgcctgcagtgaaggttgaacataccctccaagcataccatcttgtacagatgttgcattagaccccgacaagaacttggcgatgaaggttggttgggcgagggatccagcaagagcgttggccgcgaagccgtataggaatcctcctaaacatgcagtgcaagcaacctattgagtcagacaaggattaaagtaactaaggagagctagtcaagtaccaagatattgacgagactggtctcgtgtctatttccatccttgacactttgcgtgcgtgcgacaggtgcactcttctcagggtcatgagttgaactttgagtatcgctcattttgactgttggagtgagactggcaacaggaaaggacgatgcaaaaagagaagccgacaaagtgaactaagagagggactcaagagactttcagtaccccgggaactccccctattcaagtcttagcaagtgttattgtggctggcacactccattcgcaagtgttttgcttaatcttcggcatatgtacttgaggaaaagcgggtcctggccgacttgttccggaacttggctggacctagccctaggtactttggatagaagggataccagtggctggtatagacggtaattattgccagggttaagacgatccttccacgtgggtttcactacatagcattgcgtacaacatacgattatcaaagttgcttgcgtcccaccatcacgaggaatgtactccgcacggagtacaccgtacatagcctgagtttgagggcggagttaattgttactatccaccgtgagatcggcatctagatctgctaagataggaacagggcggcagaagaaaatgcgtttgctgcgtatgtggattaaatgccgtactccgtgcatgaatcgtacttagtggtttttaattgcattggtcttaaagaagagtcatgtaggacgatcagcgtcagctatggcttgacggtctcgaactaacccgcgctaacttgacattggcgtttttagcaaagtcggggcgttcggaaagtgggggggggcattccatggtctggctttttggcttatttttgcttttttcgttttcatgtcgaaacgattacagggatgtctgattcgccagtggatagagttcatggaatgtacccactcaacgttgttagcacattaacggtcctcccaaggaggggcagatgttagtctgtgcagacgggccgaatggtcccagatcaggggcacaatgccgagcaacaaatgcaatagattatcaaacataaaatccgacctggccacactaaaccgaaacaaagccattgttttgccccctattcttcacatacccatatcctattgtcaagccgatcatctgcacaatggatgtcccggaagcgcctatctttcccctccttgaaggcaaggttgccatcatcacaggaggcgcccaaggcatgggcaaggctaccgcgtctgtgttcctccgggcaggggccaaggtagtcattgccgatctgaaggaagagcaaggagctcaggttgcagaagagctttcctctctgggagaagtccgttttgtgaagaccgacatctccaagtcagaggatgtacaaaacctcattaaggagaccgtcagcgcattcggcaaattggacgtggcgatcaacaacgcagccatgactcccgatcagactcccctgatcggtttcgacgagtcatattggcgcagattggttgatatcaatttgaccggtaccgcgctgtgctgtaaatatcagatgcagcaaatggaaaagcagggcacaaagggctcgattgtcaatattgcttcaatcaatgcctattcaccgcagccaaatatgccagcatacacggcaactaagcatgcactcctgggcttgaccaagcatgcagcgactgaaggtggcccgaagggtatccgagttaacgccattgcgcctggagcgatcttcgtatgttttccccacctttaatccagggaggttctaacaatagcagagtgatatgtcggccgcagcgttggagattatgggcaccacccatgatgagtttgcgcccaaggttagcagcttgaacagattcggacaggcccatgaggtagcgcaggggtcgctttggcttgcatctgactgttcgtcgtacgtaaacggaatttgtattcccattgatggaggattcctggccaaatggtagttggtttttcatgcgctatgttgtacatattatcttgtgtgtggatgaacctgcagctcttcgcctaagggtggggtcaaccccctgtgacgctaattatattctcctcttatttcaacgtgaactctcttggtcaaaatgatcccggaagtcttagacaagatggaaacgcacgagagatggttaggtcgatacgggagcttagttcaaggcaatgacaaacattccatctacttttgttagtccagttacatggttgatagtggataacgctattggtctcccatcttgcggtcttgcattaggcaacgagacgactcgaactactctccgaaatgctagagatgaagacatttcgttcatgcgaaacacgttcagttagatggaacaaatcacacgtgttcttttgcttgaacaaggtcgaggctcatttggaccgtatgtttccttgttcaaccgattgcaacaacgtaagatgccggactgtttgtctactcggccgtgtctaggccatcacaccacgatcaacattcagagtcctagaggaaagatgtcattcattccagaggaaaaccgagagatgcagtttaccgaggcggtgattgtaaatgcattgagaatgctcaactacaaagaagccatattgaaacctatcaatcgacactgcttgacgaataagccagatactatttggaactgttcatcacgataatttagagacgaaatgacaaagcttctgttgcagcacactgcaactgggcaaatcatttgtaatcgagacatatgttgtaactgttcaagaaaaccaagatttccagatcaagttcataatggccgatagacgcattgcccaatggacgctgtattgaagatatcccgtgccagaactgagtccgcgagttgtgacttgcgactttgaaatctacagtgcatttgagcttttctcaattagataacaggaagatatgctgttgactttacgtttatggtagactgctgtattccaaggttcaccgacctgggaaccttggaaccttccttgtatcggcccacgcggatgcctccctatgttgtacgcaaatttcaactcctggtgttatctctttgatacgagacgttgaaagctaaatttgacccacaactgtcagttgaagttgaagttcaaaattagatactcgataagaagttgatactgtgttagtagattctttctgctgacatctagatatataaatcaattcaaatttaaagtccattgaaaccgtttgaacgaatataataagaaattcaatgccttgctcgcgacagcatattgatgctctagactccagggtttccagccaattgtggatatatcttccttttagtttcaatttcgtggatccgcagctgcgcttcctttttgactagctagttcagcgcacatacaacggcacggtttatgcgctagtatccacatatcaggcgacttttatacataaagtatatactccgtatacctgccgactattggagtcaaatttatgggtgactacaaaatgaggttgtggggcgagggcgataaacgggtcatagaacggtttcatatgtagcaatatatcgtactccgcactccgtactttgttcacatcttcgtattaagtggaaataacctatcatatattgagcttgtggacaagccaatgatatggctgaccagtttcattaatactgagccatttttcataaatagacgtgtccaggttgtcttcatcccgagccaagtccgtgatctttgctcagttatatcaccgtcaacatgggtagtattcaaggcccattccctcgcatatacgagggcaaactcgctctcgtaacaggatccgcacgtagtaagtccgaaagagactcatttggcatccaatactcatcatcttccaggcattggagctgctatagtcgagaacctggccagcaagggctgcaatgtgatcatcaactatgcgaccgagggctccgacgagtccgcagcagtactcgccaccaaactccaaaaggaatactcagtgcgcgctctgcccattcgagcagacattacctcgcgggaggaatgcgcacgaattgtatccagcgcaaaagaacatttcaccaactcggaaacaggatctttccaaatcgacatcatcgttcacaacgccgcggtgttataccttggcccattggaatcggtcaaagaatccgaattccgtcgaatctatgaagtgaatgttcttgggccacttttacttaccggtgcctgcaaggagtatcttcccaccgatcgctcggggcgtattgtgatgctatcgagtattgcatcgaagacggggacggagaacacttcgctttactcgggcaccaagggcgccattgaggccatgacacgtgtgtggtgtcgtgagctggccgagagagccaccgtcaactcaatcaaccctggtccggtcatgacggatatgtatatgtctgcacctgatgaggtcaaggaggggcttgcgcattggaatcctctcacgccgttggtggctgttcgggatactgatagcccggaggtgcaggagttgggtaggaagtttggaggaagagcggcgtatgcggaggagattgctgggttgattgccacgatctgtaatccggagtttgggtggtgtactggaagtgtcatttctgcaaatggagggttgtcctttagtacctaagtatagttaattttgctaatatgaactctgtgactttttaggccttcaagttagaaggtagttggcttattctgtatccaaacactgcagccctggaggtgggcgaatataatgtctcaggcaccaattactgcctgaggtttgaagaaatcggtgcctgaggcaaaaattcacccgaggacggtgctcaaagagaaacacaagatgcaagcatttcaagcttgttctttattcttgctcgatcaatttgacttctgatgatcttctcttctcaatttgagcctttatttgtcggtgaaattaagcttgttattggccaaactcaaatccacctcttcgcaaaaaaaagccaagcaaacattcctcgacgtctcattttccattcgacttttctacactttcctatataagtgtcttcggacatcgggatataacagtctagatcagggtcaacaccccgaggggtactgcaaaaatgcccagtcctccatctcatccatattaccccttggatgccgatgttgtgggttatcagcccaaccagaccccggtgatggagcttctcgtctctgctggtggggcctgtactgtccttcttggtgtgactttcgcattggccagatatgtgaaacccacactgcgcgtggcggatcgaatcgccatcctgtggtttgtgctctgtaaggcgccaagataaatatcagcttggaggttgaacactgacaatggggatctatagctggaactctgcactgcttcttcgagggttattttatgatccatcatgcccacatggcttctgcccaagatctctttgggcaactatggaaagaatacgctctgtcggattcccggtatatgacttcggacacattggtgttatgtatggagaccatgaccgtggtgagtcccacagctatatacaacgccgacgctaggattcaccgctgattcccaccaagctcctgtggggaccactgtgctttgttgttgcatacttgaccgtaatcggccattccctgcgccaccccatccaggtaattgtgtgcatgagccatctgtacggcgacatgctatattatgcgaccagtttgtttgacgagtatgtccacgggcgaccatattcccgaccggagccgtattatttttggctatattacttcctcatgaacttcatctggattgtggtcccagcgtgtatgccctacagtccccgggatgtctgttataggctgacttggttaatagactatctctaccaaagtatctccacaatctcggccgcacttaaacgccagtcggaaaaggacaagactaactaggtaagacttctttcgtcataactggtatagtggcgggtcgtagtggagcattgggctagaattgtgttggcacgaagtactcagagaatttggtgttgagcttgaggagatacaagggttcgaggggggaaattggtcaatgtatagtacctaggatcatatgatagccttatacccatgattaatcgaggctgtctcctatgaatctattcatgtttcgagcttgaacaggtttaatagatatctccaaccacactaagtgccctatgacgctgatgtacaaggggcgccacccgacgcgcaaccggcgttattaaccaatattagctgccctatctccctagaagaaatttctctctaattttgaggtcaggatcatctttaataaagactcagcaggtcaaatcacgagggaaacctccctttaatgagaagttgttcgcgccgatctggtttcccggcaaccgatttagtgcgggagggggaggcttatcgaacttgtcagccccaacctccaaagggtctgacgcatttgtttatgatccttgaaggattttcctgagatcgtccaaaaaagcaaatgctccaaatttgttaaagacctttgggggctttggtaagtaccaactattgtgacagtcgaagtcaacaaactccgtgttttccgggtatctgctttgacaacaaaacttcgagagagctccctactaagtcttggcttctgcgttgccgtgtaggtaccgatgccatctcctgcgacgtcacaacgtccctccaatcgtggaggaactgcgaaatccgccaaaccgctggacatcggagagccgctaggggtgcacgacacgaacacggtgcgctctagagtgcgaaaatggcagcaacaaggcggcggggtcgttacagtcgacgacccctatgccgatgacggggaaaatgatgcgaagccgaaaccaaagcctgccaaagtcaagatcgagaaactggagaagctggagaagctggcgaaggtagagaagccgaacaaacccccgaccacaaggaagcgcagtcacagcacaccccgcaaacgggtggtgagcgatgagcattggaaacgaacgagaagtcgagcctcgacccagtcctcgtcgcgcaacctgcgcaatctgcccgcacctaagcgcatagccgaatacaccacaaatgaagggcagcttaggtctccacgggggaagcacgacgatagtgacgatgagaaaaaaggtcgcggtccttctaaacccctaattcgagacaccaagtccgcgggcgcacgacagagtatcgacaccatcacggagagcgactatgagacagaccatcctagatctgtggaaccttcggagctctcggacagattcaagacgcgctcgcctcctccagaggatgcgtgggcagcaagcgaggcggatttctctgagttgtcgaggagacgcaagcgcggcccagcaaaacctcccaaaggtggtatattcgcacacatgctcgacgagtccagaaaaatgtttgggattcctgaacccgaaccgccgagacctacacctacgccgactacgggccgtggagccaaaatcgaggcatggctttctgacacaccggatccttttctggatgaagtcgtttctaaaaatgatatgccagctcctctggatctgaagtcaggccgagcaaggcgatctcaaaaacttgctgacggggactcacagcctcctggtaccgagtctgaaccgtcaacaatcagcgagcgccggaagagcaccgatcatccgaagagcactgagtactcgaagagcttcgatcaccataagagctccgatcgcccaaagagctccgattacccaaagagcgctataaataagcactccaagggaagggacagcttttcttcaatcgacaaaacacacaaggcacaagatcgtgagacggcctcagaatcgaaaagagctagtatagataggacttccaagtcatctgtcaagagcaaaggggataattctgtcgaagacaagctttatgaggatagtgctacaacctcggagtccgatttacaaccattctccgatggtggctctgaagtatcaggacttaacgcacctgtaccacttggccgtaagaagcccttcccggtcaccggtcatcatcgtttatcgacgattgcttctgcggaaaccttgagcaccactatcacagacataaccgagcacgtaccgaagtctgcccctatcgaaaaacttgaaataaaactcgaaccgaaactcgaaccgaaacctgaaccggaacttgaatcaaagcttgaatcaacacctgaatcgaaacatgaatcgaaacatgaatcaaaacttgaatcgaaacttgccgaggaagcagaaaaagcagaagaagcagagaaggatgaccagttcgatcccgactcgctacccgtggtatcctcgcaactaaaaagacggcttaccactcacaatgacctcatgtcggtactatccgtctcggcttcgcggagcagaagcatccggtcgaatcggagcattcgtactaacaaaagtcgcctggcccacgcgacagttgaggatctgctctatgaactgtcaggtgacgagacaaagtatatgcgcgagctaaaaacactggtcgggggtgtgattccggtcctcttaacttgcgtgctgtcccgctctgattcagccattgccgcaggcctatttcggccgtctctggaccctcaagatgacgtgaacttctcgaagccaattgttaacatgggagtggcgatcgagcgcctcaagaacctccacaagcgaatcccgcaggacaacgcggatgcattgcttacatgggcgcaaggtgcccagagagtctaccgcgagtacttgaaggcgtggcgtctcggattcaaggatgtcattgtaaatctggctcctcgggaagaagacgaagccacaaacgatgctgacacgaagagcctggatgagggcttggagcgagacgaaaatggcgactttgtagatagcgatggggaaaaggtcgatgtggcctatctactgaagcggccgttagtacgtctcaagtatctagcgaagagtttcaagggtatcaatattctggagccgtccccaaaggctgaagaaacggctaccgcctatcaaattcttgttgacgatgcccgaaaacgcgtccgagatgaaagagcgaggctggaagatgactctgctgcttgtatcgacccaacacgcacaagagacccaatgaccttgggtgtcctccgcgggatcggcattgaccagactcgccatgtccgtgctcgcgatttcttcaatctatctttgtatcattcaagtggtcaacttgtggattgtcgagccgagcttttatatcgagacaacccggcaagcaaagggcctggaggcgatcttttgatttgcgaaatcgatcattcagaccgctggcttctcttcccccctatggacctaagatgtgtttcagctcgcaaaggagactcgaaacatgaaatcgtgctcatgctgcgcagcgcccccgaagatgcaaccaagtactggcaagaattaatctcgctccgcattgacgaagaagaagtcgggtctgaatgggtctcattgctcggatctgaccctattccgccttcaatttgtcgaagccaaagcttcatcagccgagctaagcagaacaaggctcgcaagccctctgctgttgattctccgcccaggtcgaatgatattgacatccccatcggcgagaaggcgaccggtaaacgacgctcgtggacttcaaaagaccactcgtctgagccaagtacgatcagctctgttatcgatgcccggagctctttgtcctcaatcgtcactcgggagactgattacaccactgggggatccgagctgtctaagccagcccgccctgacttacctcttcttccttccacagctcccaggagctcgctaactagtcaggaaaggactctcgctggactcaaacgatccaaggcaaagagattttctcgccacagtgacagcccggcttcagatactgcctctcagcacactgtatctgagaaagcacccgaacacagcgcacctgcggttgccgctcctcaaacaccaagtacaccaacaggaggtagattctatggcgaaacggaggaatcctcagctataggatcaccgagagaaaaatcgcgttcgaggattcctcaaccccagaagacccctgtcagggaaccctcccctgaatctcctagggtttcatctgtgccttcagtaaatctcccgctgattcccaaaatccgaactcctagcagccaacctcatctttccactccgacacgcatggaccccgaagatgaggaagactatcctcccctcgaattcttgcccaggcaagaaattatggagacaccaacaaggactaggagaaggaagtcgcgaagacggccaaaggatgatgatagccctccacctcccccacctcatcgctcgcctagccctgcccatggcaagcgcgcaactcacccagttctcacccccactagtggtggactcaagcgacgtggctcttctcccctgaagcacgaatatgaaccctctacagcttcagattactcagagaccgactcggacgcgtcaacagtgcgccactattcctactcatcatctgaatactcaagatccaatggcttttctgactcggaggatgattactcctcggtatctgaagacgaagaatatgctactcccaagccaagagcacacgactcgattactgatgccagttctctctcgccttctaattctgtgtcgcagggtggctaccgtactgtgccgctgcagcccaccaagaccagcaaagccattgcgtctgtctttgcgtggtccgacaaaggcaactgggagcttttgttccctgacgagtgtaccatcgtcgttagtcctggcctgatcgaggccttcgcggtggactctaaacctgacgattcctcatcaccaagaccgctcatctctcttgaactgacaccgctcgttcctattcgccgtggcaccgccatcgacattagtatccgctctcctcccaccgagcgatcccaggtcacatccagcaacaacatcatgttccggtcatgcaaccctgacgaatgcgatgccctatatggtctaatcaaccaatcaagaatcaacaacccaacttacatcgcgcttcaaaacgctcgcggtccattcaacagccatgcctctaccttcgaacctgccccgaaagccggcggaggcctgtttggctggccccgccccagaaaaagnnnnnnnnnnnnnnnnnnnnnnnnnnnnnnnnnnnnnnnnnnnnnnnnnnnnnnnnnnnnnnnnnnnnnnnnnnnnnnnnnnnnnnnnnnnnnnnnnnnnnnnnnnnnnnnnnnnnnnnnnnnnnnnnnnnnnnnnnnnnnnnnnnnnnnnnnnnnnnnnnnnnnnnnnnnnnnnnnnnnnnnnnnnnnnnnnnnnnnnnnnnnnnnnnnnnnnnnnnnnnnnnnnnnnnnnnnnnnnnnnnnnnncccagccgcagaaaaagctatcgcgcatcgagctccccacgctctctagccgaaggatccgaaagcagcgtgggaaccatgagcagcgcattttccgccctcaaacgattcggaaacggcagcaaaatgttcaacattgcccgctcaaccatcgaatcccgcactggccgcgaaggcagcatctactctggctccggtgattccggcaacgacccatcccccaactcgggcttaggtcgcatcgccgcagcagtcaaaggcgccgacggtatcggtctctcaaacgccaaggtccgcctgtacgcacgcgaatctgcctccaagtggagtgacatgggcgctgcccgcctgaccatcatgcccgcaccacccaagaacccatcccgccccggtagtggtctcagcggcgacggcagctcaccgcacggtgacaacgcaagtggcgtttcgcctcccgcatcaggatccgcctccccgcgcggtgcgctctcgactgagaagcgcattgtcatccgcggcaagacacacggcgagactctcctcgacgtttgtctaggcgagagcgcctttgagcgcattgcccgcacgggcattgcggtatccatccgcgaggaggatgaagacgcgtccatcgcgaagcagggtggtgtcgcgactggctctggcaagatatttatgattcaaatgaagagtgaggctgaagcagcttatacctttgggcttgttggcaagctcaggtattgatgagtgatgtgatgagtttgatgtgttgggtttatgaacgagctatggacatgaggtatgggggtgcattgttggtttttttctctctttttgcttttccttttccttcttttcttctttatatttttgcctttcttcagtcattattagctctttttcttttgtacatttagaccgcagttgaatgatatcccggccgtggaataatgcaatcgtctctcatctttcttcaccttctattttacagtgacatgtcctcgatattgagccctttatgttgttacttcacatttatctctgtgtctcaaggtttaagtgcttctatatatgccattctactcttgtatatatactatagtccaaataatgaacatgtatcataatacatcatcctaaaggcaattcctgaactgcgagacacacagtagtctaactcctcatttccgccccattggtcttcttgaagacatacccaatcaaattacactcatccttcagcatagaaaccaacacatcatcatcaatggcagcttcaagctcctcatcttcagccccagcctcattagaatcggactcggctgcaagcagagatgggtcaatgtgcgagtactgagctaaagactggtgcatcttatctttgggactcttagtctcgctttctttgtctttcgtacttttctttcccttcctagctatcttggcacgatgagtgccgtcccggatagactgttcttgtttctccatatcgacctcagaagctttaacaagagtatgaggtttcggcagcgactcatccgaatcataaccatcatcaaagtcatcaaagtcagaaggaggatccgacaagtcctcaccctcagacccagcatcaacagtagcaggcgtcgcagccccagacgaagaagcctcaacgtcagccggaacaccccgtccaccacaccgacagcccagcaactcatgcgtctgacaagccctgtcctcgtcgagcctgaacaaatccctgagttcagcagccgagaactgcgcaccactattactggtgctcctctcctgcataacactatctgcaagaccaagcttggtaacctgtctctgccaaatcttctcctcgagactgcccttgagtagaacacggtagatgcgacaaggtcgtttctggccgtcgcggtgaatccgtgccatggcctggatatccgttgctgggttccagtctacatcgaagaggatgagacggctcgcaccaatcaggttgagacctgtcccgcctgctttcgcagatagcaggaaggcgaagcaggagcttgcggggagacggttgaaatcgtccaccaggccctgccgtttctgggcgggtgtgctgccatcgaggcggaggtaggggaggcctagggaggtgaggagggttgcgaggagagagagggttgaggtgtagtttgagacgaggacgattttctcgtctgttttgttgcgcattgtgtcgaggagttggtcaaggacgcggatttttgcgctcgaggagggggataagtggcgatggagaggttggggaatggaggcgatgagggcggtcattgtttcgttgggcgtgttattgttgtttttcgcggttaggagggaagggctgttgctgagctttttgaggattgttattagttgcagggcactttcagcgttgcccattgcggtttggaagatcggggaggcgaggactgctttgtagatgtttgcttgaggacgggttggtttgcagaagagaacgtattcggtctttggtggaaggtatttggccaggatgtctgctgttcggcggagcatgaatttggaggtgagttctcgcagctcttcgcctctggactctcccttctcgatttcctttcgcgttgcttcgggctgtctgctgcgaacaattggggtctcgaactctcgaatgaaggacttgaaagttcctaggatccctggattaacaaggtccacggctgcaaagaactctctcagatcattttgaattggcgtgccggagagaatcactctcttcacggcgctgagcgattggatcgctagaccactcttgttctgcaaggtcttgagcctatggccttcgtccgcgatgataatatcgactccagaaccattcgccaaagcttcctggaccgttctgagtttctcatatccaacaatcatgatactataagcccggcccttggtgaaatcagtcagacgcttactcttgtcgtcaaagacaaaaacgccaatgcgctcattgccgagccacttgcggaactccttccgccagttattgataagagtgacaggacacacaatcaatgccttcttaatgacaggcggggcttcaaagacaggattctgcttgagcagagtccaaagcagcgcaatagtttgcaaagtctttcccaagcccatgtcatctgcgagaatggcaccttcaccattaaacgaccgcatgcccatcacacactcatacaagaacttcacaccctcacgctgatgcggtcgcaagttcttggtcaagagaggatcaacaacaacatccacaacctgctttcccttcggcacagatttcggccgcggcataaccaacgcaccaaccgccttggggtcatgacgcggaacgaccttccccataaccttgggagcaaccgtattcacaagcagcggcgccttataagccgcaaatttcgcgggtgcagttccagggttcgcattagggtttgtaacgagagctagcgagcgcttgagggactgtgtccgctcagcagccgtaggtttgcgtacttcacccttctttcgggcggggagggcttctttcttgggtgtgggcacagggtccggcgtagaggtaggtgctgacttcgtggcttccaggaacactctgccggagaggtattccttgcgcgaaatctcggagtctatctcaatctctttgccggagatagacagtgttgttccgggctcgagacgggcttcgtgcaccttccgtcccatctccttcccggcaatgtctcgtagatacacaaactctccgcgggtagagagaattccgtctccgtcccatgttttgtgctttttggcgcttggtttgcgcctgtctgtgttagctggttcgctgtaactggtgctcaccagggatcaacgttccgaggacctaccagagaacattgaaatatctttcgtcggatgtatcatctttttcaccggatgatgactgtgttgtgctgtcagatcttcgattgttaacttgtaggagtggctttcgactgtctatcggtgattgcacatccttgggtgctggttcgtcttcgaggcggggctttttggtaggacgactgggctcgtcggggttgttggtggaggttgtagcggagttcctaactaaaggggacttgaagggtttgaagaccatgactgtgttggtcttttctccttccaagattaagatggcgttgggatgaggacgcgacaacaggcgcgggacgcgtggtcacgtgagctaatgatctttcgtgtgaaggactgggcttggaggaaaactcgacttaatttagattctagctattgataccgataagaaagtttgcatcttcaaaaaatgtgtttggacagtgaatatcaattatgcttttacagtagctatgtataaagtcgaaaaaaagtctaacacgaataaaaatatacataaggcggatataacgttaggtcgcatcatctagaaagagcattttatagctgtgcagcagaaaaaagctgtgccttgcaaaataaaaatggtatacgcaaaatagtcccccaaacatcccaccaagatttaccgagcatcgtcggccagggccttgtcggtcaacgggacatgcttcgggccctcgtaggagccctggtggacgaaccaccagacggtaacgaaaatagacagaccaccagtcatcagactggcatagttcatcgacgcggcatcagtaggcagagcgtaagggaagcagaagataatagcgaaggcgatgatgtagacacaggccagggagttgacgatgtagccaattgtgtcattcatgtggaagtatccaggcacgaaggaagaacggcgggtcaagatgtgagggaaaatggccatgaagtacgaaagactggacaactgcacgaagcatcccacgaaggcgctgaaggcggtagtcgagccgaggtagatgcacgccaggatggtgacgagaccggtgcagatcagggtggcgttgaaggggttcttgaacgtggggctgatgcgtccaacccatcccgagaatggagtggcgccatcacgagcaatagtccagagcgtacggccggcggtgatgtaacagccacaggcagtgataaaggtaggcaggtaagcgacgatcagaagacccagagcgccgccacgggagccggtggcttggcggtagatctcagccagggggaagaaggtggtcgagtcgcgcacctggtcgaggtcgttgatggaatagaagattgcaatcatatagcagataccagtgatgaaaccgacacccatctgggccaggatagccttggggatatttcgactcggcctggattcaagttagcgattatagatggaatgggaaagaagaacactgacttggggatttcctcagccaagtgagacgagcagtcaggggtgccaacactgtaagcaccgttgagcataccagcgacaaagacgaatccttgctgggcataaccggttccgttttcccaagttgcccacacgagcttatcggtggcatatgcagagccgttcacatgaggcatcacagcgcacacgatgatggtcacgaacacaccagcgagaatgaagaacaaacccaggtttccaatgtgaggtaggaagcggttcatgaacaacacaatagcgcaacaggcccaggtgttgaggaggaagctgataaagacgttccattgtgagggcacgaagctgggatgcatcaattgatacatagacacggtctgctgagccagaatcaaagacatggatgcggcaccgagaatccaagccaggcaattccaccatccagcgtagaatccacacacgcgaccgtacttactcccggcggtgatagttgcccaatggtagacaccactggctgagggcatacccgatgccaattcggcaatggatgcggcgaccagccagtagcagatagacacggctatgctaaacaaggggttagctttggttggttgaactggtttgggagagtggcatacaattcatagatagttcctgccaatccaccgttactcaatgccaccaccacactacctccttgggcaatccatgtgtttccggtggtcacggctaccgcacagatactgagaaggccaaagttccgctctagttcttggcgatggcccgaagcgttaaccaactctccgtccactggaccatcgtgggtgtaatccggtgtaggtgcgatttctttctcagggacgtggccgatctccttctccgtcgaataattgatctcattcccagacatgttggatatgtatatggtaggggatttccctaaaaccagacgaatgcgaggtccaaaatgtacagctcccgaattgaagaatgatatgggaagaatcgaggcgaacacggatgttaagtaaaagggagtcaaaggcgtacaacggtatattatcatgtcacggctaagccgatcaggtcgggtcggtcgacatccacgcattctaattcctcaatctctggccaatcagcattcgcggagtcacatcattcggtggccaacaggtccatagtggggtcgccccagagttcctattggcggagccggagacaagggtgtacaaatgcactcgaagcggaaacttttacaatcaacgccgctgcatggctgaattacgcttaacctagaaggggagcttcagcagaagggggattcccatcccccttagtgtccttttccgtgggttccatctctacttcttgcttttttggggtgattggggctctttggcggggtcaaaccccagactctgcttacttcttatcatcgctactctaaatagatgtctatctaggattcctagagataacaagaccagttatgcatgcttagcataagacataaggcgatggttggaacattccataatccatgcagatattccatgcagcgtacccacataccgtatacttagtatacactattagagatttttcggagatttcccctatttgagattgaaacatatgattttgcaagcgagacaagcgagacaagtgtacttgacaactacactacttgtaaactaaagtataaatgctttactagcccagacacatcaaaggatcaaagcgtcaagcaataggtaacactacgggtataactatgtgggcacaaacagtctctgctgtccatgcgacgggggtgtctcatataaggtagaaattcactcgagttcatcaattggaaaccatcggaggcaatctagactccgaatctctttgcctgggagcacagttgtactagtgcagctgaatgtgggttgcgcagataaggcgactccgattttagcctcagatctagtgggctagtctgatatatattaattaagtagctgctagttaactaacaaagtcttatgactaattaagtttactcaagtgaagtcactaactaactacggcgtagctacacgttaatgaattaatctagagtataatatattgtaaaccgtactgcagtgagattaataaagtctctccttccgaagttcccgaagtttcgaatcttcaaacttcacatcggttcattcaatcctctccaagttgcatgtacaacatatgttgtatcagcccgtctccataaaagatgaaaaaacatccgaatctgtccgtttcccccggggctgggcagttcccaaaatccctcagaaaaaaaggctcgggccaataggtgactggaccatggatggtcggtgatttccccactttttacagttgtggcggcaaactcagaatatctgatttcccgatctggcaggtattggccatttttaatgaattccagtgcaatgtgttaaatatagtcaaatctgccgatagtgacacgcagccggtatatccgaacaaactctctattctgacagttcttcagggcttactccgtatacaatgtatgagttatgtacatgaatactaattgacatggatattggctgatccctcagctcctccaccctccactgtgggccattcccccagatagaaagagccatgtctatcttcgcttaacgacgatgattggatataacaattatatgtagatgtgcttatgtctcccagttcagaaggtaggtaacaactaggttcagtatggatctctcaggaaaattcagcctaaatatcctcggttataaaggcctataaactgtaagacagctgaacttacaccttacatggaaattccctatgcaacggtaaagtggaccaatggcaaaattgttacaaatcagaatgcagcaatgaaagcaatttcccagactctcccgatccaaggaaccaccttgccatccaagcccccactatccaatggcggctatatgccctgtatcttgggttgattggcgttttatcctctgcatcttgccaaaccttgtaccttcaaggctatcattcagcatacttcgaaggttctaacgcgtttcctatctcgtcgtacaatcggcggcttatgcaggagctggaactctatacttaatattgcatatccccgctactctcataaaatgtgagcgcgcctctcgactctcgtttcactccaagatctcgttaacctctattcgaaaaggccagcggtaatgtctggcttaggaggccacttcgccttggaattcgcccatgagacatgggctctgtatgctgtcggcgtactgggtgccgtcttgcgatggtacgatagtaattgaacatcctactatatacaacactgacaaagatcctcgacagggtggctcgttttcgacgcttaggcattcgcaatctccagaccgacgactatcttatgctcttctcggtagtctggtatacaatactatgtgtcgccttaaatcaagtcgcctccggtggggggtcaaatctcatgaccgaggaggacaggaaatcgttaacggataaaatcatcgcggaacgagtgcgcggtagcaaatgggtctttgtgtcggaacattcctttattctttgcatctggagtttgaaagcatgcatgctggtgatctatgcgcgtatcacgtatgttgaacctcgattgggagcatgttcttttctaacgccaatacagtgaaggattaaagcagaagcgttggatcaactatgtctcgatctacgtcggactaggcttcgtcgcaaccgaactgtcactcttcctactctgccacccattaaaagactactgggccgtcgtcccagagccagactaccaatgctcatcttaccagtactacgaaatcgtgcagggctgcatctcaatctctgccgacgtattcatgctcctcatcgccattcccatgctagtccaggtccgcgtcccgctcaagcaaaagctgatcctgactatcctcttcggcatgggcgtcttcgtcattgtcgccgccgtcctgaacaaggtgtactgcctcgtcccatctctgatctcctacgtctacatgaactggtacttccgtgaagccaccgtcgccatcctagtcaccaacctgccgctcgtctggtcactgctccgcgacgtcttccccgccctcaagagctggaccggcggctccagacgcggcaccgaccgctacaagtccgggccctggaccagcaagggtggctcccacctgcctccctatggcccgcccagccacacgcgctcaggcgacttcggcatgcaagaattcgaaggcaccactacgattaccccgcaaaaggcgactgcttccgatgccagtatcagcgaggggcgggcgagcagcgacgatggctcggctcgcgctctgcgcattcgccaggatatcacggttacggtggagcgggactcgcggccgtcggattatgaggtgaatacttcgcgtatcacccgcgcccgcgaggaggtttaatctttaatcgactctctacacggagaacgttgtcgttctctttttcttatgaatccacgaagtccccgagggcttaatacccagtcctgtatattgtctctattttgtctgtacatatttacttctagacactaattgtgcatatctttttttctctgaatatagagttttccttggagtctcagttgaattgcgtattccattaactataatctccactgtcatgtccacacatctcagcttccagtcccaccgatgtccaaaaccccggtgagttaaccacttttcaaagatgcaaccttggaatacattccatcacagcccgccgatctcccggccccttgcatccagatgccgatcttgtcggtgaagagcttaggcctacgtccgaagaactctgcagggatttggtgaactggcggatatggctcgggcgtcttccttgaaaagcacgtatccccggttccgacaaccaatgtggcgtcgtagccatgcaaagccaagatggttcatgactatcagcactgaggccaagccgcacggagtaactgactagtacatcatccttgaatcagtcacaggctatatacatactacccggaagaccaccgtccgaaatcacgtcgtgacccgagaaaaaaggcgaaaccttgggatcaaccaaaatctcagccgaaatctcaaccgaaaaatcgttcctcaaggttcccaccccacagtcgatcggcacatgaatcttggaaaaaaatctgatacgaaagaaaaagactgggacccgaaagccaaagatatgagggcaaatgcttgaccgagcaatatccaagtggatgtgttcatggataccccaccataccaaatccaggaccctggccaaagccaccagtccactgcgcactaccgtggacgaagctcaagctctcccgaacaacgggatctgcgtggagactagagagacctcgggatgtgacgtgataagggaaaaatggagcaattagcaattgtcgtcggtcatagtatctgcttgtgctcccgaggtaccctttgtgtttggaattgcaatggatactgtgtatggcgtattattagaagactgtctacggagtaaatgtgaactatttcagtcgaccgtaagccgcgtcagtctaataaatctgagtttcaactgagtttcggcgacccagccttgcaggaaaccttgagccgtcaacttccttacaatatatatgatgtatcttatatcttgtaattgacggagtccggcagatatataagcccttctgctagatgtttaaaccctaaaccacgtgtcttcggcctcatttttgagtgataagccgatcagctacccctattcgagcaagctgcacggataatctgctatattagacttctgccatgtgctggaggggttcactcgcaaagttagttcaacggcctcggtacttgcatgatcatactcgaagtcgtactctcctcctattatttgattgcactccgtacactatgttgtatctactccgtaccatagtgggccccgttcagccgagtactgtactatgtatataacagtttatcttttcctaataaggaggtaatttgccttttcctttcctttttcagcaagtgcactattcatttccttttcgctgtttttcttttcgcctttcttctcttctctgcttcggcgtaacccgcttgaccccaccaagaccaagacctcgcccttcgaccgcggctactccgtacatatgttgtatgtgctgacgcgctctgctctgagttatgggcccactctctatttgcatacaaagttgcccaggcttaacctctcgcttacagtttggatggctgcggggatgctcacctaaataggagctttgcccgttgattcggccttcaggtacggagaacgccgtgcatatgcagggttggcaaagaatcatgtaacattacaacatccatggtggcgaattgccgggcggtttgccttcgctctagctgcgtctcaggcatgcatgagtagtctctaggtaggaacggttcttcgttcgccgcgaatgtctcgtataaaaggttgaatgtggttatcacgtgcgacatttggtccaatctttctcgaccaaagtctattcgaaacccctcaatagtgcgagtttacaatataacagaagtatacctcagaaactcaaccttgggagcatccatataagcaaaagtccaccttgaagtctaaataaatgtcttgaggttgcgttatccatgaagggtcccgggcgaaatatatactacggaatgatttctggcatagctactcacaaccttcaatatattcacagatctttgatactacgtactttaagtaggtagtatacacagactagatggcaccgacctaatcttgcgtatgattgaggctagaagacacaaaaattatagactcttgttgtttccgtttattgaacttactttcgagtgcaagagagttcgttgtcatttagatatcacaaaatgaagtagacccgatattataggacacccgctctggtcaagaccaaggccggctatatctcagcacttggacagatagagggtatatatatatccgattctgagataagcacgtcgtctacaatatatttccacccttccacaaggttacatatatcccaagtcatctctggattttgagatactcgagaccttctatgcccatgtcggatgttcacattctatcagggcaacggaagcataccaacctcaccaatcatgtgttcgtcctgcaagatctatgaagtcgatacacctaattagtgtgatgtagttaagagctggttgtggtttagctgtctcattcagaattcattcgactaccatgtgcttttgcttttacctacaatagggttgaaatatacataattttggttgaattttgagatagagaaaatctattaacatgattgtcgaggctaataagccttcgactcgggacgtatccaccctgcgaaggctacataagtacatgaaaagagaatgcgaaagatactgcaacgccgtgcgaacgtaaacaaagccggaaaacaaaatcatgagaaagtcatgtaccaatgcgtttcgcgttttagcataacaaatttaagaaacccgatcctgtttaatcgtacagatcaggcgagacggggttatcagccatctcagcgtcaagatcatcctcgtccatcatttcatcatcgctcatctcactagcctcgccaagatcgtggttaggcaagacatcgatgcgactgtcgcgcatgacgacatgggcgacctcgccatccttgatacttccgcgcagaatgagcacagcaagacggttgaggatttcgcgctcgatgagtcggcccaagggacgagcaccataggctggggagtagcctgctgcgccgaggtagtccttgacttcgtcgctacattcgatagtaacattgcgctcgttgttgtcgagccgcttctgcacctcggaaagacggaggtccacaatcttgcgaatctcccgccttgtgagacggttgaagatgacggtgctggagatacggttaaggaactccggcaggaagtagtcgcgcagagcgttcatcaccaactcgcgggtctggggctcgatgcgaccgtccttggtagtcgggcgggagagatattgagcacccaagttggaggtcatgacgacgatgcagttctttgcgtcgacgacacggccctggccgtcggtgatacggccatcatccataagctgtaggaggacagtgaggacttcctttgcggccttctcgacctcatcgaagagcaagatcgagaatgggcggcgacgcaggctttcggtaagttggccaccggcgtcgtggccaacgtatccggggggtgcaccgatcatacggctgagcgagtgtcgctcttggtactcggacatatcgaaccggatcattgccttgggatcatcgaacaggaattcggcaagcgcttttgtgagcagtgtcttaccggtaccggagggaccacagaacaagaagctgggaggcgcgttagggttactgagacccgagcgctgcaagcgaatggcgttagagaccgaaacaacagcttccttctgaccaacaacaaccttggaaaggtatttctccatgttaagcagcttgtccttttcagtggtcttgagtctgttaacaggaataccggtccagcggccaacgatttcattgatttgatcgggaccaactgcatcggcaaggagtgcttcaccagagtcgcccgcttgagcgcggcgttcagcatcagccttggcccgctcagtctccagacgctcgatgagagctttggtttccgggatggcgtagtattcgagatcagcggctgtctgggtatcgcccaatcgttcggcttcgtcacgcttgaccttgagagaatccagcttgatcttggcctcctgaacttcgcggctgcgctgcttctcattttcgtacttctcgcgcatcggccgaagctcctcgccaacattggcagcttcctgcttggcggcctcgagacgagccttggatgcttcgtcttgctcacggccaagggcgtgaatttcaatttgaagctggcgggcctttctttccagtgtgtcgagggcttctggctcggactcgcgagtgactcggactgcagccgcagcctcatcaatcaaatcgaccgcagaatcggggagtcgacgagctgtcaggtagcgagatgcgagagtggcggcagcgacgatggctccatcgagaatgttgacaccgtggtgagcctcgtatttttccttcagaccacgaagaatagagatggtttctgggactgtaggctccttgacaaggacttgctggaatcgtcgctcgaaagcctgatccttctcgatatacttgcggtattcagagagagtcgtggcaccaatacaatgcaattggccacgagccagcatgggcttgagaaggttggcagcgtccataccgccttcgccgctagaaccagcgcccataagcaggtggatctcatcgacgaagaggagaatggtatccttggaatcttcgatttccttgaggacacccttcatacgttcttcgaattcaccgcggtatttgctgcccgcaaccagagaaccgacatcaagagaaagaagacggcactgagcgaggttggcagggatatcggcgttgacaatacggcgagcgaggccttcgacaatggtggtcttaccgacaccaggctcaccaataagcacagggttgttcttcgtgcggcgactgagaatacgaatgacacggcggatttcctcctctcggccaatgaccggatcgatcttgccctcacgagccaaggcagtcatatcaatggtgaacttcttcaggttttcattctcgccctcggcatcggcggtcttggaatcgacccgctttgtaccgcgaatttgctggatagcagtgtcgatcaacttgagattgggaatattggcatcgcctagcgcacgctgaacttgtgaatcctggcaaacagactgaatgagatgatcaactgcgacgaagctgtccttttgtgttttcgacaaatcggtggctgcccgaatgactttagagagttggggagaaacactggggttctctggagggggatcttgactgggcaggcggaccaatagcttcattagcgatcggtcgaggagttgagggtcgccgtgggctcgttcaacgacctggcggaagagaggggcggctgcggaatcgtgggatgcgtgggcaccagaaggagtctgttgatcttgagactcatctggggaggggttgagcaatgcgactgccaagtgaagaggcatgatctgggagtgtgcatattgctcgcagagcccgctggagtccagcagggccttgttggcccgatctgtgaattggacgccgttcattttgaacggaagagtggggtaatatcaattaggtttagatgcactgatatagatgcactgatatcccgagggggattatagcagtggtgtaagaatagaaagtaattgagtgagtagacttgggaatgagtgacttgaaggacgagaggctagttcatatactctgctgcgcggggtgcccgaagctgccaccacatccatgtcgtcactactcgtttccaccgccttccagaagctgcctgacattgcctgacggtgccagatattgcctgatgtttccgaacaaacgccgaacatcggagattccggagaaaccattaatccatagtaactatggacactcaatgacacttacattttgcgacacgcatgcactataactagtcagtcaattaccgccttattttataaggtaaggtttcccagggccaatgttgttattcaaggtaggtgtcgatccatatttagtcaattaagccttattttgcacgaggcaacagattgtacggaacactccgtaccgcctggcagattgtactggcacatgacatgtcaaagtcagctcacgtgaagcggacgatatagacacgtgatgatattggcacgtggaggcacgtgatccacgtgacaatggagttgctgacctcagccctatccgttccgagatgaggtcagcattctcggattcttggaaggttaaatcgcgcaaaccagaacccttggatgttcaggctctccacgttagagagatgattcggcattgatgttcctcgagcttgcgtgccttgcagtggagcattgaaacaactcagttccaccggctcctcttacccgcaaaagtccagatatgaacaaccgatgtggcagccaggcgccatttacatagcaacaattactttcagccaggcttctgccatgcgtcgcgtatgttttttatatcgtgttccacgatagccgacagaaaatatcctacagctagtgaatgacgtcaggtgggatctccgcagagcaattaaaattcgaagaaatcgatctggaaccttgcccgggatcagacctcccccttgcaagtacctgctcagactaggccgagggatttttatacacgctttatctgtgcctttggaatcagcaccgtttaggaaaccgactttcacggggctgcatgcgagaggagtaccgtctcagatgagaagctaagagacgactggaccgtggatggtggacacttgttccaggtcgacgcatccagaattgaagatcgatccacaggcctgtccacaaggtgttgtcctattggccgtttcatcacgggaaggtggtcttgagattttttgtttcgtgtctccttggctggagagggatgagaaaaaatagaagcggaaaggtttctgcggggcagagaggggcaggaggctttatggcgttcatgatttcaacattgctcccttgcctaggaggcatgttgaagccaatgaagccaatggataagattgcatatgtattatgtactccgtgcatggtatgcagtgctacatgtaccacatctatacgaagtactactataacaatcctactatgtactacaaggacggaccatgctatactacaagctagcttatacgtaaaatgcctgggctaactaactgattcgtagatctgcctccataattacatatttttcatttcttttccatttttccaaggtcaaactaggaatccaactctggtagctctccgcatcccgaaggctccctgaaaaccaatgaaatcaaatcaaatcggcaattaaacctggtacctatgtcatttgttcatataaagagttttaacccccccctctgcatctctttttcattgttctaacgccatagttgcagctgagacaactagaaagctctcacattcgctgtacgtttgtgaagaaaagacccgccacccaaaccagaaaatttctgtttcgccacagcttcaacggctggatttgaattatccctgctttaattgatcagaacgtgagatccactggacgtttatttacaattacctttgttgacttttgctgagattgaacctgcaggttacagttatctcggtcagtattaaatcatcgcaccgcatacaatatgtcagacaagccgatctttgtggctacgcatccgcgagcatgctcgacggcctttgagcgagtaagagatcccgagagattcggataaccaatttattctaaacacatatctaatggcctgcaggtgttcatgactcagcgagatattatccaatgtgtccatgagccgttcggtgatgcattctattatggcccagagcgcctatctagccgattcgcaggcgatgaacatgcgcaagaacgcgtggatagtggattcgccaactcgacatatagtaccgtgatggaaaggctggagcgagaagctacacaggtccgacccttctttctgcgaagtctctcgcgttcttacccatccccctcgtaatgctcttcaagttctccctgtggatcgaacatgagggaagatcccttacctgtttactttttttatcttgcacagatgtagcccgagacaatttgtcccccgtctacaactgtagatcacacactggctccaaattattgaccatggagacccgcacgacggaatggaatgttcgcactttttgaggggatacttaccttgttacagggaaagagagtctttatcaaagatatcgaccactatttgctcccaccgaatggtcagcccgccagcattgccccttctctactgcgcgttaagcgaggagtcggcaccaacggcgactcgacggctaacggtgtgaacggtgccaacggcactcacaccaatggccactctgtcacgccaaacggtcacaccaacggggttaacggagcctcgaatggaaccaacggcacgacgaacggtgtgaacggtcacaccaatggaatatccaaggaaccctacccgtacgacacgcccgcagagctgggaaacccaacggtgatgcctcgcgagctgcaagagaagttccactgggcattcctaattcgtgacccgcactacagcgtgccgtcgtacctgcggtgcacgatcccacctctggacgaggtgaccgggttccacaactacgacccgctggaggccgggtacgatgagctccgccgacacttcgattatctgcgagatactggattggtcgggccccgggttgcaacgcgcccggagctgaacgcccagactgatgcgcaggcgccggctggcgttgaggtctgtgttatcgacgcggatgatatgctcgatgagccggcgaagaccatcgaggctttctgtaacagtgttggtttgccgtaccgcccggaaatgctgttttgggataacgaggaggaacatgctgttgctcggaatgcgttcgagaagtggcgtggattccataatgatgctattgagtcgaaggctctggagcagagaactcatgtaagttttgtggtcattgatgtgggggtatggggacttggactttggactaacactgtttatagaaacgtgctgtcaagaccgaggaacagtttgacgccgagtggcagaagaagtacggtgagaagcaagctgctctcatccgccgaaccgtcgacgccaacatggccgactatctgtacctcaagtcatttgtcgtgaaggtctagaagaaataagcgaaacaagagtggaagagaaagaagagaaagaagagaaagaagggagacaagggggaacctaccccatattatttcttatgagaacgatttggtacggatggcgccatctccacggggattggttgatgaccatgacgatcttgcgtattgcgtatgctctttgttccatttggccgatgttatagctacttgctggattttcaagtttacttagcttaagatatagttaagtactggctattgaccatgtcgtattagcctaaggttgatatatacttccggcagttccttcctatttgggccatccacggattaataggccagtattccgtagctctttcctccctttcattactttacactgtacctgcctattaagtctcgtcaacacattcgaaaccataaacggaaagtccagaagtatcgaattgggttgaggttgtcttcgcccaagtgttgagaccgtttctgcctcagattattcgtccgggtacttcccttcccttcccttggcagcccccggtcattacttactaccgttagatctattcggagggcgtctgagaaatacaactactcctataagacaggcaaggatttcgagtcgtacaagcgccacagtcattgctaatattcaagctaatagaatcataaaattttcgacgtgtcaacatatcacttgaaatacaaatatgaccaggtattctttcaagtaccgaaattaatggataaaggtcaagtctgctagcagcatggccgtctgaggcagtggtgcgcgcctatttgtggaccttggcgttagccttgagggcactgttcggcacatagagaggcatcgagtcctcccagatcgaatcagtaagcacacgcttattcgagccatcggcattcataacgacgacctgaccataaggctggaaagtctgatcatagagagcacactcgtactggaagccgaacatgccggaagagtaggcaatgcgaccatcccaagtccagatggcatgagcatcattggcaccactgctagtgagaaccttgacatcagttccatcaggacgcatagtgcagatatcgtagttgtaatcactggtcttgcgggtaaagacgattctctttccatcgggggagaaggaaggcaggttatcccactcattggtcaagacagtggtcttacgggtctccagatccagaacacggagtccgagctgggatctgtcgcccagggtggagtttgttccccaaatgcggaagacgatcttcttgccgtcgtgcgagaagctggggaagccggagttgatcacgctgctgttgctgctgagggttgtggtgctctcggacaggacttcggagtacgagccattggcagtggctcggacaagccagccgccnnnnnnnnnnnnnnnnnnnnnnnnnnnnnnnnnnnnnnnnnnnnnnnnnnnnnnnnnnnnnnnnnnnnnnnnnnnnnnnnnnnnnnnnnnnnnnnnnnnnnnnnnnnnnnnnnnnnnnnnnnnnnnnnnnnnnnnnnnnnnnnnnnnnnnnnnnnnnnnnnnnnnnnnnnnnnnnnnnnnnnnnnnnnnnnnnnnnnnnnnnnnnnnnnnnnnnnnnnnnnnnnnnnnnnnnnnnnnnnnnnnnntcgtacaagccagccgccgccggtggcgcggccttggaaccagaagccgactccgaaggagacccacttgccatcgggcgaccaggccgggttgaaggcgcctgcggtgcccttggcgacggacgacgcgtcaatgaagtcggattccatgtcattgtagactaggctctcgtcggttccgttggcgttgaaggaaacaatggaggagtttccaagctgcttctcagtcagagcgatcttgttggtgctggacaactgggggaagacgtcggtgaagcgatattcccactccgtgtcccagctgtacaacttcttgtccataggacggatagtccaggcgttcttctcatagacgaccttcttgccatctggagaccaggcaggagagcggataatctcgctagtggtgttcacgtatccaccggcagtggtgtggagtccttcgataccggaacccttgccggcgtaggcgatagtgccgttggggagatattgagggaagagcttcacgccagttccctcggcttccacgcgacggttagcgcctgtggcaaactccacggagacaatgctggagttggcagagttgagtgactcaggacggtgagcgttccaggtgttctcacgagtcatctcgtagtaaacaatacgctcgccatcgggagaccacttgggcgaaccaagacagtaaccagacttcgacacgacgggacggaaatcagatccattggggcggatagcatagatggacagctcctgtgtatgttcccagccggtgacaccttggaagatggggtctccgtgtccgtaccagccagtgttacggtccgacgagaaagcaatccattggccgtcgggagaccacgaagggcggaaatagccatcaggaagagaagtattggcggcagtcgagacggtatctgtgaggttccatttcttgccactctccagatccaggacccagatgttggccttgtaaccattggcagtggacacataggcgacttgctttccattcggagacacgacagctccgtcttccaccgaggaggttgctaccaactcctcaaggtcagacccgttggtccggacgcggtagatatccgaattaccgtcaccattgcgctctccggtgaaggtgatccattctccatcgggggaaaaggtggcatggtattcatagatagagttggagaggagaggacgttcatcagtgccatcaacattggcaacataaagctctgatgtcccgggagcaatgcggttcatgtagaagattcccttcttgtcagacgacgccgccttgcgcggttcgtgcgcatgcggagagggcgtgttcctcttctcaaggttcatctgctctgcatatgggcaaagagccaaagccgacggcaaggcaaggcccagcagggcaattgaagcgggaaaatgcatagtgaaaatgagtcagtgcaccacagcagttcaaggaccggagcccgttatttctggcaccgccatacttatacataaaacttctgcaggggaaacaggcctgaaggaccgtagcgcacttctctcctccacaggcccaccttcgcgtaatgaagtccgcgttattagcgggccttcatcttatctgatgaagcaagctagcgagtgaccaccgaccactgaaaagtcctgcagaatatttgaccattcatctgattggctctgtcaaatgaagctgtgacttgcagggctcgaaacaaggcaatgatcgtcgtggctcgagatgaacggagaaagcctcttccgtcggttaccgatacattattgttgtaccttggggttttgatataccctgtctgcacaaggggtgtatatctatgcgcctaagtcgacgtacaacaagatcagggtctgcagtatgcaagagagagacgatcagttcttacgcacaactaccgaccctcgatacgtcaattagggctcgggtactggagcgagaaacccgaatgccaagaaattggcacggagatatccctttgatcttgcacaatatcctgctgacccaggcaactccgcctatctcgttcgtcaatataatccaccgaccttgcaagctcgagcgccgacgcaattcttcggcttggcaactaccattctggcacgcaaaatctgcccctttcttggtttaatatcgggaagactcgtaaaactcgagttaccgaattaggacgaaggtctagccaatcaggaagaagacacctattttacaccatctctacatctattattctcgatcaagggtcttccttctgagataacttcgtcagggcccgattaggattcacgatctaggcagtttaggaacgccagttaatggaatttggagtctccctgatcaatgtttcgagtcttcacgagctccttacgaatctccccgagctactagcccctctttactcttcctgcatgcccaacagcataaaaattgaatcgttggacataatcggagtccgaatatcggtccggactaccagattaaggggataaagcgtagatcgaaggtggatcagtctcattgtcgtcttggcactgggctgttgtcaatgaagtgccaagtttccgagaggccggatcctgaagttcgccaataagtacgaagtacagtgtagcgtgggaaggccgttgataatggagccacttgcatgcatttggccaggaggcacgcccgatattcaatactacctacaacatacaacatataactatttctgaattaggaagtctagactctacagggctagccttatggtatgcgaaacacagtgtgctttaatcaagtcaatgagagaggatgtttgttgagaaggcataaggcctctttagtgcttagtgagtaaccattgacggttctcgtgagcaagagtgggtaaagtcaatgcatttgatacgagtcagaggacagaacaagagtggactacagggaccgaggcacgggatccttcaaagcgtagcgtaagcttgtttgttgcctgcccgtgcggtgacttgggactgcttagttatctgggttttagacagctctagacgttgggaggaagctgtagacttgaattgcaagagctcctaccaattcgatgatcgaggctctagaagaccttgagacttcttcggcggaaatgtggatcttacagaagattatgacgagtagattgcgagtagattgctatttaacagccttggcttttcagacactcatggttgtgccatgtcctgaggtatcgttaacttcgataaacgtctggggaagtgttgccccatacaaaccgaagactgacacgtcagagacagacaacagtctcactagcaatcttcggtgatcggcgcaagcatgggtagacgcaatgctgcatcctaggttacaacattatagaagggctaagtgactctagtgtaaaggacgcgaagatcgtaataactggcctggaatcatatcattcgttatggccaagcatataaacacctcatctagcgccaaaactcatcaagaaacatacacaacctgcaaggcattgaaccccggccgaaacagcccagcaagaaaaagaagatatggtatcttcatccaaaagtacaaaccactatagaaaccagtccatccaagctaagttccttcataccgcactgtagccaccgcgcgagcccgctccttgcagagtattgaccacacgacggagccagtcctggaagaggtaagggatatcgcggatggtgtcgccgtgggggaggagatcccagccacgggcgccgtaacggttgtagttgagccaggagccgaagatgagataggcagcgatgccgaggaaggcactgaatagaatgattagtagggcaatttaatgcggaggccacaagaaaatgaagctcctaagaacgaagaaaaactcacatgataagcaaccaggtaaagaagccccagctcttagatccgggggtatcacccttctccttatcgtactcgtcgcaggcatactttgtgcgccaatccaatctcaggatataagtatcatcatccgacggaccaaagctcttgaactgcagactactgctgctgttgcccgagggcacatcgccaccttcctcgccatccgctctccgtcgtcgctccttcgtctcgacgtcatctccaagtgtattcaggccctccagtccagatcggtcgtggtcgcactggaagtcaatgatagcgcctgccttcttggcattctggtcattgccatctcccttgtatgagccgccttccaatttaacgcgtaatccctccgtttccgggtcgagatccttcaatcgcttcagttctgggttcttcgagccctggccaacggggtcgagcccaacgatcgggaaaccgaatgtagagccgccatttccgtcctttgctactcgatgcacgaatccgcaaactggagaaatacataaattagcgtgaacaccccaagcagatgaccaactcaacatggtcgtgtcatctcagcctagaacgtaccgtttttgctagtgccgcacgtcgcatcgccgtaccgagcagcgccgccgaggatattgcagatattcaatcgataggttgtattcgtcacgaagtcatccgtcgtcacggtgtgggtcacctcgtgaacgccttttaggggactgagatcgtatttgtaattgtcgagcttgatgtgcgcgcagtcgaatccggacgcggatgccagactcggtaggagggcggagaggaggagtgaaactccgcttgattgtattcgcattttggtcaatgtgccgttgggtagttaggtggcgatgggtagagtggaaggacgcgggtgaaggctgggatgaggctttcgcgcgaacggagctcgatagctcaagtggagatggtcacgagggacagctgtacacaggacaagtgtaaccagtgcagtttgatcgaaaatggaggagaactggttaccgagttcggggtccctgtgaggttgaaaagtgacgatgacggggatgatcctacggaggtgtttcgtttctccggtggcggtgttttggcactaaaatgtgcttcactcaactcggaatgaagatgcctcaaagtatttgaagctatctctggagtttaatagttcaatgacttttcaacatgttttttatattcttcagagaaagtagcctatgatgtcactccagatgtcacctcagtacccgatggcctaacacccgatgtatggatgtaaagaagatagaagcaaaatagaagaaccgatatatccgaaaaagaagcctacataaggcctattaatactctgcaacctatatattctactgtatagatccctatccctacaaacaccaacctcatccagctcatcgccacgcacagaccacccactcaaacccgatatcaaacgcgcaaaccaaccaacccgcaacgaggacagaacaaatcccagacacgaaagaacaaacaaatcccaaagcccaaccaaataaccacccaccagacagccaaaatggtgcagccgcgtatggtaagcccaacccccaccaagctcaaacgcgacaaaccccaccaaagcccagctcgcaagctaatcggatcaacgcgcagctcacaaaagcggacgagacatcagccaatgatgagaatgaagtccgtcgcgaggatcaggagaagatcaaccggttcagtcggttgcatcagcgcgagaccgtgcttcaggaggagttgaaggggaagcaggtatggactttggacttttgaggattttgttctctgccatgtatcggatctcttgctaactggtttatagaaggataaggaagatttggaagaggtttcgatggagttggagcttgctgatgaagatgagcttgtgccgtaaggaatacctttcccatctattcttgcttttgtttttttcgatcatgttctgttgtggcttttctctgtgattctcatctcggagtattacgaagaaacctaaaaaagagcaagaacaggaagaagccatcactaacaaccttcacagctacaaaatcggcgactcattcttccaactaccgctatcagacgcgcagggaatgctctcgacatcaacagagaagatcgatgcagatgtttctaagctagaggactcgcttggtgagctgcgtgaggaaatgcagcagctgaaggttgcactctatgcgcggtttggtcggagcattaacctggagacttgattaggatgaattggatgtattaccactatcactttttgtctcttgggacttatttctcatgattttctattatctatcttaaaaatggggaccgaggtttgacaatcttcaattgttgtctagattaacatgcggatggatgaacttcatgatatgtttgctcatggcatctgcttcatacctcataattataggtacatggtatgaatatgtagataaagccagacattataagtcaggtggaaccacagctcgttattatcattcaaatagaacacggtagtaaagaggtatctaagaaggcgggaagaaaaaaggagagaagagaaacacaacaggaactaccaacgaaacaagtaggcaaaacagatggctccaaacctgtggcatatatttaggaaccgcagggttccacgcgaatcgacacagataacagtgatgcctagccatctggctagcggtgaccagttcaccgatctaaaaccaatgtgagggtcctccaaatcaataaaactgaagtcatggccgcacttctgtacgccgatattgtcgtgggcctcgtccaggagggatatatatacagcgcgcgcatttgtgttttatgtgtttcccgtgtgcgaaagttgatcaccggaacttggcacggcagcggcccatgatctcattctggcagaccagttcagcgctgaattcactgccgtctagtgtaaggtagatatcgaagtagacacggtagaagatgccctggggtgtatccatgcgctcgaagtcggtctcgaggttcttgcgagagagatcggatgtgagtgtgacgagttccttgatgcctaggaaaatattagtaatttgtacaaggaaaatgcaatctctcaacttacgtggatccttggtgtattcggggcagacatcctcatcgcaggcgtacagcacgtcctcgtacatgagggtagcgccaggtgcaacttgacggaagaagctgaccttgactggttcgccaatcctgacacgctctcccttttggacaaagatttgacgggtgtacttgcatcgatcgcggccatccaaacttggtacacggtactgttcagggtgatatccctccttgaatggctgaagcgtggccatgaggtagtgtcgacgtgccacacggtgcgtgatgacccgctcggtaatacctgcggtgactgcgcccttgacaatggccgccacagagtccatcggacggaccacctttgtctgatactgtggtggcacgtggagcttgatctgctggaagaggtattctgaagcaccaaatccaccgacgaccagaacgttctacacaattgttagcactgcattgagactaggatgagatgctcttacctggagcagacggttctgtgcttgaatggcgataatctggttgcgcaccagctcgaggatacggttcacgacaggctcgaaacactgaaggatctcctcgttcgtgaaggtcatgtagccttcctcaataccagcatcggggaagtcggcctcgatacccacgtccactgcccatttttgtccattattgcggaagtcggccttgatacggttctcgaagtccatgatacacttcgcgtagaccttgcccgcagtccgtgacccatccggcagcttcattttacggatcttggcgcgcaagatgttactgaaattgcggttcagtgccgtcgaaccacacgagtcaccagacccggcagtacattccatcacactgaaaggcgactcttcctccacctcatatgcgatcaaatccacggtaccaccaccacaatccacaatcaaaatagcatcgcccaccttcaagttgagcagtccgctcttggcacagaacaaggcggctgcctcgggctctgagactagcgtgagacggttatcgttctcgtcgcgcaagaagccagcttggatagcagcagtccgggtcgcagccttgccggcgtcgttccaaatagccggtaccgtcagatagtaacggatattgcgttcctcgcgcgtgaacacctctcccagggccttttgcaggttagcgcgaatggcttgtcgtagcttgaagaggtaatcggcagcgacatcgatttcggacttgcccggggggagggggggcaagttgatgggatcaatgtaggtgtttccagagagcatcagttgaagcttgaaccactccaccttctgcacttggggcttggggtatccggttggggcgagagcgtcggcaatatcggggccccatcctaccaccttttggtattggtcgtagtagaggacggtaggaatctaggagagcagatcgttgtcagactagccttcctggggtgtacttgttaagttgcgctcaccttttgttttgcatgggtcccggcgcctggccattccgtgatgatgtcctcgctggcctggttgttggtcgcaaatgcatatgcgacacccgagaaggttgtaccaaagtcaataccgacaatcagttgggccttgctccggccaccaccctcaacttcgaccgcagggttgcgccctggatactgggtattggacagtgacggtggaatgctaggagccatctgctgttgctgcatcccataccccggcgggccgttcaagggagcatttgagttgtattggaggtttgtggtaatgggcgggggctgttgaccatgcgccattggactagttggtcggttgtttgtgtaacttggcggtcggcctaactggggctgggtctgttgatggttcattggaagacttgttgttgatgaactggaggggggtgatgaaggggtgggagggacaatcgggttggaattaggaggagattttttgttcctaaagccaaaggacttaaatcgggaactcatgaggtccatatgaggcaacaaggaagggaaaagagtaagaaaccggaaggggggggaagatgaaagagggggaaagtgaggctgagggatgtaaattgtggagatcaaagagactgaaagaatgacaacacggaagataatcagtttacagtaatttagttttaaaattagcaaattattagaagatgaagaagatgaagaagattgacgatttaaatcccgactctctggttgaggcttctggttgaggctgagaaactggtttatactagttctacttaaatgtggccccatatatagtcattgtttataagataccagaatcgagtacggagtagtagttccgctataaacatgtgaatcgccaaattattcaaattcttgttattcgaatgcattcaggctcacagtttctcttggcgcccaggtcttcgcggggtagggagtatatacatgttcttgagacatgttttattctatgtacatcgaggtagtataactatagaggttcccaagtctccccttttcaccgatccaacactaatcccccagctggattactctctttctttgtccaaagtttggcccccaaaggtgagaaaataaaaataggaacacagccttgtctagcctccgaggtgtgttggctactcccataccgccctatataccgcctgcctaggaagcatggttggtgtgtttattttgtttgaatggggttttgaaccggcagaaccggcagaatcttaaaagcggtatgttgtaccgaccagccccattaaactgccagttttcgcgcgacccagtgggagggttgataaagattctgaagcatgctgttagggtcctggatgtagccgcaagccttccgagctccacgcttctcgaggcggaagcccatatgctccacgaggctcagcacttcttcctcggataactccacattgcccggctcgccaattccagccccctcgtattcggagccacttcctctacgggagtggccgtcatcgaaatgccataataatgggcccacgttgatccagagcccatttggtttgaggctatgtcggatcgtctcgatgtaccgaatgaggtttggcgccgtgtcaatgaagaaaacagtcgttactgcgtcgaacatctcatggctctcgggctgagtatacaatacggtaaaatccgctgcggtcatggacattgtacctaagtggtgaccagcactggcagcctcctgcatggcgaacccggggtgcacctcagggatcataacttgctggagttgctgtgctcgtgattggagattggaaaaatgcaatgcaaaaggatgaagcgcgtgctttgccgccccgttagtatggttcagaacccagctactggctagcagctggtggtaggagatctcattcccctcggcatcatagcctgccatgcagatctcaaaaactagacggcccaggccagcgccagggactaaaacacggatttgctcaccgctatcacgccgtgtctggaactcctcgtgaagatcctgaagaacggggtcatagcagacttccctctcgggtcgtccttcgaggctccagtcccgatagaactggcgtatcgtggaatgcgctttgttgacatctgatgaggttgctacgtcatgccaatattgagtagggtccgttttgtcgggatttgctgaaagaccgaatgagtgaagacccaccgccagaattgcatcggcgatatcggcgttggtatcaatggcatcgtccactttattgaagttatcaaggatggagaacggaggctccgagagcatctgccagtgtgccgagggcagggcatagaaagcttgccgtcgacgatgggtagtattcatatgcgcatttcgccgatattgtctgtggatatattagccagaactttgcgattgtatgttaattggttgtttcgaggcagaaaatattgtaatcaactgtccatccacgtacctgaatgagtcgaatgcagcaaatagcaccctacgctcttcaggatcagcgaaagggttgaagtcacctccccaaccgttctcctcctccccggtctccggcttttgatgctcggccatgcagaggttgtcagcctagctccacactaaaggtgctggtcaatgctacaggttcacccgtcccatgagtgaactgatagtgacgaaggaggaacaattgttgaaaaaacgagaagagtatatggaggggcagacaaaacaagtgggaatccctcctattgggtaaatttatttaccgctctactctccgccttctcatctgggaacagaaacatcataggatgggtgtatacctgtaacaaatataatatagaaatatatatatgcatctgttcatccattagacgttagggatccgatgatccttcatctgcctatatttgactgttgaaaaagagacaaaaggaggacaagtggttttctgccggcataataccttaagggaatgaaccaatagtggctgttatggcgcaccgtattgtagagcggggattcgatatcgaattcccgactttcaacaacttgtctaaataccattctcgccacagatttcttcctttacaccgagaatcggtgaacacaaatatggcgaccgaagccccaccagccgttccttcggcagagctagccactcccgccgtcaggcctcaagagctctcattcagcttgcccagagctttgcatacgacggcacatgttcatttgaccttcttgggtaattgtgccacaatattcctggctacctcatcaccaggcgactcgggcggttctatcaaacccatgggaagtttcgtctatgcgatgcccgatgtaagtaccttatctgccaagtgtggaatccttgccatattcaaggaaagacaatgtcattttctcatgtcataccatatggaggaatggccttattgtttggcatagccccgaaatggggctcctctgttcagtcggagtgggatatgctgcaatatgccgcgcaccccaacctcaagctcccattggcagaggagttgtcaggctaaacggatatccccgaacctgataattcatattgctgatatttccaatataattacttgctatcaggatttggctgacatctatacagcgcacttcgcccaagtcgacaatatcaacaacgctctacacatcaccatctagcatcgaatatacaacgcgcatatccaagatcctggctcgaagattttcgatgccagtctatgttggttgcagtattgacccacatagcatgggattggaagtcgcggaggaaatcgaagggctgaccaagatcgtcgacgtgatcacggagaaatgggaagagcacaaacaggagaaggctgggaatgctaaataaacgtttgaaaaaatgcaaatttattccaatcgacggtcagaaaaaagtacctaattggatctatcactggcctgattactcaacctaacttaccaccgatctcaaccagatcccaacactagccttcaacagtctccgccgggaagcggtcaccaggtcaccggcaaggaaagtcgaaagggatttatagttgtgtcgggttcatggagatcctaccaaccataagtagatgcccttactcgaggacataccacagtttccatgtggatgatacgttcagccgtaatagaaaatcaacttgtatctcagacgcaaatataactaagcttaattgccgcatgtgagacatcacatgcacgttgattccacttttcaccaggataccaggtatctatgttgtgcttatcactattgcatccaatgtggacattcttcaaactccacagtggcatatcgacacttgcataacttcatattccattcctaacaatcgcatcatcagacccacaatgaacgaagaataggaaaaacaaaattctccccacaatacaagcgaaaaaaaacccaaacccaaaaaagcttcgaacctccatctcctcggtaaacaacccgaaacatctccggtccgtcgaggaaaccccccatttggtctgtgacacccgccgactagcacacggaagacatcgggagtctcgggttgacaaccgtgacagttggcaagcagagcaaatcggaatgactcggttaacgggtgtttcatctcgatcgttgtcccgctgtggggcgttgagccgtgggcacacagaggtgaacatattatttgctccaacgtacgttgtatcttgatctggattgcccattctcaatgcccccagagtcaagtggacatcgcctggtttatcccagacacagagtcgtatctgccctgccccttgaaagtgggggcaaaggtcaaagcaatgtcacactatggctcttttcccctcggagccggccgacggtgtcttttatcgtatacaattggacccgtggacggctcggtagcggctgctgatagtcgcgtaccatgatatgtatgtcgaaagtataaaattagaatgggggccgattgcccgtcgcagatatggaagtgttccaattggagccctcgcaccacaccgcaagttccgaaacctaagcagggcaccaggccctcgtgtctagcttcaaactagcaacccaacaaagcatcaaaatatatttctgcagatatcattggggaggggcgcggtcaatgcacttacacgtgccattgcagactcccctgcataagatatggatattagttccggcagaaaacctatttggttagggttaagcgtttagctgcaagacgcatgtcggtccttgccaagttggggtcatgataggcggttatttgtttctttttttaaattgaaaacattcaaattaagttcgtcggcaaagtacgccgtactgtcacgggttgggggtctcggggcgagttccttggaagtacggagtagagtgctttctaaccgagggggtgtgcggggaaaaagggcttgggatggcgacattggaagtggatgggctcatgggtggcactatacctgtgctgattctagtcaaatcatgttgactggcaataccacccggtgagtcgggggaatcattaccctcgcttgatgagccgaccgggaaagttccgagggcgcatccgtgacctggcaatgtttaacgaaagactcccaaagtacggagtatccaagcggctgatgctgtctgtgccccacgatctttgctgtttttgctgtttttgctcttttggcccttttctttcttttcccctctgcacatcattcacagtccactctatccaccggtaaagcccaatgacgtgcaaccaaggcaccagtgggattgcgctggagatattctccattctcggtagtcgacccagattggagggaaacccggactagagatggcttggcgattcaagttgggctatcttgggacatggagtgacagagtcgagccctaacccatgtacccgacgccgtaggagatatacaaccctggacagcgttcggttaaagctcgggaaaccagccaaagccacagccaaaccttggacggccaagtcgaaagctaaaaagcaaaagaaaaagagaaattcgggccaacacatccgattccatgtggtcccggtgcacttccgaagtcgatcatcagggcttgtgcagagggacgagatcttcgtggacgtatcctctttttcgccctcgtttgctatatactcttatattagcattactagtccgaagtatactagattaattgtctatgcactctgcactaaatggaaatgggagttcatggaaatacaactactgactcgtccatcccaatccactgccacctccactgccgatctcgggatcacttgcttgtcttaccagtctaagatgtacatctgcgctatagagaagaggaaatagtcaagtctcggctcagatccgctgaagattccttaaccatatatgcgacggagtacggaagatcgtaatactctgcgtcgatctatagttcgttttttattattttctgtgcatttcccttttcttttctttttttcccttgagttgatttgacattccccaatctccctttcttcacaggattctttgatcttcatctgtcccaacctcggcatttacatactctattgtgccgggctttaggctgcaaatcttttctggctaatttctgaatttcctattttccttttctatttcgatctcgacaatggctttgcagtctgcattcgaataacacctttttaaggaaatcggaatcttgacgaaactgtggcgatagtccttatcttacgcgattctcaccacgtggacttttaatttgtttctcccagatttctctatttgactagagaaatacatcccaacatgcagccctctcattttcgtggtaatcagggctacgaactcccatccgtgcagtcggtgacgtcgggcgcattcccggctcccgcgctgctctccgctccgccgagcaggcctgacagcgggatgcgaatgtctcatctactgcagccgatgcccccagcggcgccggcgacatccccgtaccagcgttactatgactccgcctcgggctccccgggcgaaaccacgcttcccgatgcgccttcaatgggctcggggctgtaccaaaccagcccggggcatagccaacagaccgccgcgcagctacagcagaagcgcgcatatcgccagcgtagaaaagaccccagctgcgatgcgtgtcgcgagcgtaaggtcaaatgcgacgcctcggagtcgtccagttgcaccgaatgtaacaatcgcagggtccgctgtcagtttaccaaagagacgaaccgccgcatgtcgtccatcaagcaagtccaggatctggagaagcagttgcaaactacaaaacagcaattacagcacctgcagacgggcatgatgcggccggatcgcatggtcgatgttgacgagggtgtctcgcagatgattaagttgcctgagattgaatatcgaccggtgcgccgttcgagggcgcccatcccgcaggatttctccgacgtgcggtctaatctccgcgattacggccagggcatcatgaaggtgcccacgccgtatcgccaacagggtgcggagtcattggtgactaggaatgcgccgatcctaccggcgaagaagatagcagatcaactactggcccagtatttcagttgcattcactcggtacttccagtgctccattggcctatatttatcgcagagtatgaaaaggtttatcggatggggtcgttgttgggtgtctcgaatgaatgggcggcggtgctgtttggtgtgtttgcctgcggtgtcatccacacaaacgacgaggatcgagaggagcaagggaagaagtacgtacgcacatcctgtgggattattgatgtctggcacgacgtcttcaatttggatcgtgctcgcgcggcgctgctagcaagcatctttctctacgaggtcaattcgaagtcggctagttgggtgtggattggctcggcggtgcgcgtggctcaagagattggactgcacatcgactccggaccgtggcctgccgtcgaaggggagatgcggaagcgtgtttggtgggggttatacgcttgggaccgaatacttgcgctggaaatggggaagccagtattgatcaacgatcaggattgtgatatcgatctcccatgtcccgtggacgagcagtacatcacagaaggaggcaagatcccagacaaccagcaaaccacgcctttgctagctacgattcacgtcgtccggtccatcggccaactcacacgcaccctacgttcagcaaccatcagccccgccaccctcgagaccttcgaactccacttcaacacctgccttgcaacattcccctctcaattccaccctaagaccgacgaagacctcgaccctcgctctctcgccccggtaatctacctccaaaacgcccgcctcctcctccaccgccacaacatctcccccttctgtccagacatcgtccgcacctccgcactagactactgcgtttcgacagccctcgacacagccaacattctctcccgctgtatgcgcaactactcagtacgcccaagaccaccatgcatctacgacccccactcgcacttcgcctctagcgccagcgccctcctctgcacacacgtctggcgctgcacgctcttcctcctcttccgcggtgaatacggcggcgccctcgtatgcgtgaaagcgctctcagcagtcggcgacgtgcgcactgtcaacgcagcctgcgggcgctatatctccttcttcatgcgcaaattactcggctgcatcgccaattccagtgcctcagtccctgatctcgaccgcaacgaagaaatgatggcgtatgtctcgggcgatatgcaagggaccagcgacggcagctggatatggcacgggtccgagacggggtctcaattggaggggatgggggccccgatgcctacaacctcctcgaactatcggacggagatggatacggatacagattgggaggggtggacgtggatcgagcagtctataggcgttctctttcaggaacagaaacggcagcaggaggagaattacaaggcttctcttgggtcggattcggcttctggtaggtcgagttcggcgcattcacggatgacgattgctagcatcatttgaacgcatctcactacatcgctccatcggcgtgtatgtgtatggctctagacaagtctagagctcgaaactttatatgggcactgtcacttgcctttatatcctccttgcaaatattgcattgccgatacccatgcccaagtacttgtttacagcctttgttttttatgtatatatctcacgaacggatcggatttcgaccgtttcagtttgcatttgcatgtcttttacttattagcttgatgaaacactgcgcctcaacatatcgacgaagcctgcgacatccaagtctactttgcttgtcggtgaccttgctctttatctcgatgattggattcaacacactatcttcaggaaagctatatacccaatgaccgaatatatttccttttcgaatttctatttcaacttctgtgttctttctctcttcttgtgtcaggtatctgacggtagactgcatattcaggctagtttaacatgggctggtgtattggactgggtgctgtgatacatagagtactgtaatgtactcgagttctttcaccaatctggtgtggacgagtgagaaagaggatcaggctttctcaagtaatattgtgcataggtgcagagataccacgcaataatagagacaaatatgttaagaatgaatttccaaaaaagagggtgacaactcccatgccagtaccctatgcctaggccacgccagccgacataggttggaatgcatatgtttataatcgcggacccagcagatcgaacgccggcagccggagctacctgcatgtttaatccgctaagccactgggggggagggtcgaagaacaagtgttcgtctttaatttataggaaggaacctggggaaacatgcttccgaaaagggaaggtgggtctgtcacatgttgatgcctgaatatgtatccgtttctgcctgattatcatgatacccattgctctttccgaatacattcgaaatgagaaggaaagagcatttcaatggcagctgaggcattttttactgagtgatcgaccccatagaggatcaagtgcagcccgtggggttatggctaatatatacagaatcattatcaacctgtgtaagctcacccaggtgtgaagttactcatgcaaaaatccgtgtctgaaattgttagattgaactatataaggctagaaggcaaatgatgaccttgcggaagaaaagaatctatataagactgaatctatcaacgactgtacaaccacaccccagctgggcaactagctgcttatttccttactcaatagtaagtcacctcgtctccatacaaagtggatccagtgccaggctgcttcacgataccagcttccaccaactcattgatcaggttgaagaccatcagatcacagccgtgaggtgcgaggaaatccaccgcgacaggcagatattcctgcttcagggtaatggtggagttgtacagcgcttggccgactaaattataattgtcattagttatacagtccttgttcaagtaatatttgggttagcatacttggaacgaccatatcgggcacaccagcgaagttggcgatacgagatgtaccgaatcctgccgggacacctggcatgctatatgatacaatggattagcaaacagtccatcaaatatcctagagtgtcagaaaggacaagcacatacctccggtaaacattgcggtaggttggtgtcgcttccgctccaatgtaaagaatcaggctgtctgagcaagtctcctcgtcgaatacctgggcagttgtgttccaccaggtggtgaatatgttcttgtgctcaatttcggtctccagttgcgagtccgggtatccaagtccccaattccaacgggacagaggcacggggttgataaagggcttgcgacctccattggcagccgcgtagtctgcatacagcggtgcgccaatgaggggatactgctgcttcgaaatgaggatagggtaagtgagaggcaacatggtgtcgagggtcgcattggcggcaacagtcgaaggcttggtggattcccagagagcatcgtaatcaaatgcggaaacattcgcaccacccaagaaagacgacagcttgtcgacgaaatcaatcaaaaggccctcagctggggtcgatgcattagttgggaactggatcgtcttgatagacttggggtacttggtataggacttcaggcctgcatccttgtacatcacctccgcagcagtgcgccacagctgcacatctcttgtcaagaatccggccgtgtccaaaaggggggacatgggcataacattatccaacgagaccaagttccacgagggcctgttgccgaagcatccattcacctgcgaagggttgcgaattgagcctccggtatcacttccaattgccaaatccagccagtcataagatccaataccggagccaggaccggacgaagatgagctaggatcttggtatccgtcaccgcgggcgttgaagggggagtggtaatcaacccaatcatcggtggcgctctcaccgttggcaaactgactggtcttcatctttccgacaatgatggcgcctgcatcaatgagggattgaactgcagggccagtagcgttagcggctgggtacgtttcatagtaagcgcggttgccacagccggttttgacgcccttgatatcataaatatccttgacaccgagacgaacctatgagtggaagatagtcagtattgcattctcttgcataatagacgagtggaatacatacaccagccaaaggcttatcggctgtcttggtataatacagccgcgaaggaacaccaatggtcaacgacgcatagccctgcaagcttgccggcaaaacatcatatgtattatcaccaacagagaccaatccctgggtgaaagagcccataacatcggaatacaaccgataagcttcaaaaatggctccactggatggatccaagaaatatggaccagcaggcaggggcgacgacgaggtcaatgtctttgatttcttggtatcatatgcagatgcatatcccaagattttagggccccacgaagaatgggttgacacattctccgagggacgcttggaggtaccgttatactggacgtagatgttgtcgaggaagccagtgttgaagacatcgtcagcagactcgtagctgcttaccaaggaatcaaggatcgagcttgtcagcttcacggcatcgctccgaatgaccgtcagaggctgcaagccattgagcttgctgaacacgtgcgaatcggctttcagggtggctactactgtaggaggaatgtaataggtgtttccattgagctccacggtttgacccttcgaggtgattgtcgcgatggcggtggtggaaagtgacagcagggccgacaacagagccggtagcccataggaactaggaggagagaccatgatgatcagctaaagattgatagtcttcaaaaggtacttttatcaaaagccgggacattatctgccatatatatacgttccactaccgcttattatttgtctcagttgttgcattgctatcgaggacttccagtgataaggatctagcgaaaaggtgaccaatttagggtaccggactttactggatcaaaatggactagccaggagattaattctcttagtacaatatacatctcttatctttcccagagctatttccgcaattcactgataagtcgagtcacagttggaggtttcatagtcgccattggctcggggaaacaagcttaccccaataagatccacacccacgttttcgtggctggtatgtagcattttgtgaattttgtacctttcgtaccttttgtaccttttgcatactgatgccatatgaaagatacccgatcggaaactccatgatcgagggagaggttatgattgactgggcgtaccaaaccctcttggcacgatcacgctacaacttttgcgttcgggaatccgatcgtatccggtgctatctatctacctgcctgttttgcaggcagatccagccacaatcatagctcttagtcttctagaaaccgattgtgacattcgatgggggcatgggctatcaggcattagtattttgctagcgttccttagttcaggaacaccctcctttcagtacaaacaaccccgcgtctaaatattctgccgcccctaactgaaagttgaattaccgccttcctaatctgttgcgactatagattctgtatagattctcacttctatcttcaaaaaccctgcattttaatcgcaatgttttacctaattcctagaaagttaggtcatatgaccaagttttctatcacttggatgctagaatcatagctttttaatgtcccatcatatgaccacgtccacctttctctatcattatggcattcaaaacatatactagatacggtcactcgcgtccttcggagctatttcgctcacgcgctggcaaccgagatgtcaaaaagagagagggggaagaatagaagatacgtggaggggaggaaaataaatgacgtatggagagttatttactacgacgtggcatcgcactaactggaggcctaaggtcaccgagattcctagtattttcttgaatccttagactccatctattctatcacaaaaatcgcgcatccctcgatgagactactaacttagcaaggtcaaaggatcaagctaatgccatggtaacactaagtcacgtagatcgacggcccgatccatacctgagcgatgatacaccaaccctggatctctacggaagagtggagagtggattaagttccccactgagactctggcgatgtccaggtacatttctccatgcactagcagggatgcagggtatctattttgggaataggcagatgcatttatcgcagtttttcgaggaatcagagaagtttataagaatcgaagatccgcactagcacccgtagccttcgaagcgtccaacccagtctatcaaactcgttctctccgatcgataggttattctctcagaatgatggcactcgtgacatccctggatacacttatgtgctcgatcggcactttcatcctcgactcactgcatgctgcgcctttccaaactttcgccatcttcctcctccttcagttccttctcgccccgaccgtcataaccttggtgtgcagatggtgcggcctagcacctggcacagacaacgagtcgcaaaggacttgcccaacgcgcgacggaagcggggttgttgatgtgacgcaagacaaatcatcacagaccgaagctcactgaattttgagattcaaatcttctattcttgagtcaagcgaaatttagcgaaaattagacgcagccaatctagacgattcatccacaaggacaagactgatctattgtatcaatacattcccaactcgaaatatgctttctgtttatcgcgctttctagtcatgttgagggctgtcattcatgtctttatccactgctctgagaaacaggatatataacgaatttccttgtcttttttgtttcaaacgtaaagccaggccctctcgtatctatgtgcgctttctttcctgcatacttcccgttatgaaattgagtaagtattttcggatcatgggcagctacttcggtattcccttttctattcttgaatcataggtcctggcgggtctttacataagaaccaagtgagagtaatagttaaatatggccacgggtacttgcataccgttagatcagaatttattttgtctgaatagaatcgctgtgttgatttgttgataagcctcggccacgcataccacacggagcagtagtgaattcaggtttccctagatgagcctccgagaggggtcacagattttagctgcggttctacatccaatcctccttgaactcactcattgatcaattgtctcttccaaggtgaatccaacttcttgaccgtcgttatttgtattttgcttgcctgtcctgcatctctactactgccatccgttagttgcgttggcataatcgttagtatgctggctactctatacgaggccgtttggtctacctctagacagaccctactccggactaatgcgactgacgtcccatggctatggaaggtagtagcagcttgcttttcagcggtacagctaatcgggtgagttaggcatcaagagatgtgagcttgacttgagaatcgggggtctctgactatagttggagtagatatatgatgctggctgtggtagtcggttcccctccccatgagttgcgaatcaatgctacagtatctactgttactgcatttgtgtttgttggtacatcttacggtgtatctgccttgattgccttcgcccagcgccatcaaacgatgttcctcctccactcaatcttcatgtaggtatcaatgaaagcggcgtctctcgatcggccacgggctaacaattgcagcccatactcgacgataaatctgctcgcgctcctgaatatcctattccacatccacgggcaaagcctgcagatgaataccttgcagattgtaaacatctgcctacccactgctttctcggcgtgttacgctcttgcggggatcttgatatatcgagagtatgggcgtaatcgagtggaggaagacatgccgctactcaccgacgaagagatgcaacgtcgccagttgcttcgcttgttgggtgaacggaatactagcgcaccatcgcccgatcttgtgcgaaacacttatcgctttgatttacctggggatgagacagcacaggactggagtcgtttgactccttgaagtatgctatagcgtaggaaatatcggatgtatatgaaaagaaatgaatgtgaaatgtgaatgtgatcgaataatgtattatttcttgcatgtgtagctgcacaatgtgtacaatccgatgtagaaacccccggtcgatcacttggacctcggctttttttccgccggtcgaccgcatttaaacgtccaggaaaccatcatccctgaaatccaccgggacatttaacctcttgtcattgatctctcctgaaaacaaatatgtcaaaacgcgtgacgcttttcgatccgcccgcgcaggatcattccaaagctcttatcgagaatgtactcgatctgacgccagtggcggacctcggcccagtatggcatccctcaatctttcgcgaatggtcatattctaacagagaactctcggtctaggatgtcttcaccaatacccgcccgctatggcatccccccggagctcgaggcatctacggcggtgccgcgattgcgcagtccctatcagcagccatgctgaccgtccccgctgactacgccgtccacagcatgcactgctactttgtgcttgccggagactccgagatcccaattttataccatgtcgaacgggtacgcgatgggaggagctttgtgacccgaaccgtgcaggcgcggcaacgggggcgaccgatcttcaccaccacgctgagcttcagccgggtcggcagcggtggcaagaagaccgttcaccacgccgtaccgaagccaaacgtcccattgccagaagaggccgagccgggcagtttggaagccctcagccatgcgggcagcggtccgtttgaatcaaggaaagcgggaattttgaaccgtacgtctttcggaagcggcatgctgtgcgcgttgtactaatggatgtcgaaattaaataggcacatccccaaacccagaagataagaaggtccgacgacacattcgcgcccgcggcgcaatctccgaacagggtggttaccaggcacacctgtcggcgctggcctatatcaccgacagctatttcatcggtaccatctccctcgttcacgatattccgcgattttcctctccggccgaactcgagaagcttttgaacgcacttaagaacccgtctgatctcgacgatgaggatatcacgcgagctctgaaggagttgaaggaagaggaggctgcggaattgcgtcgtcgtttggaaggggctttgaacagggccacgaatggcataaaggaggtagatcataaggaggttggaatgatggtcagcctggaccactcaatttacttccacaatccccgtgcattccgtgccgatgagtggatgttgacggagatggagagtccgtgggctggcgaaggacgaggcttggctattcagcagatctggtcgaaggatggactgcttattgctacttgcatgcaagaggtatgtattcgtttttctattctggagcttagtgctaactcgatcatagggtgttgtgcgattaaagcaagacgacccgccaaagtcgaagatttaagagcttgtgctataccctaccttgaaggagttctctcctatcattttccattcttttacatatcttcacttatagatttgggcttcgtcccctcgactttctctggttttcttgaattgaagctggacattcttagttatagcttcaccgcacgagcatattataattcaatagaacaattgtctcttgtcttcgccgaattacccaaacagtctccctaattaacaaacccaaaacatttgaacgcaagaaacgcgaaagtagaaaacacacaaaacaacttttgcgtgaaacaaaaagccgacccaattttgatcttccagagccaaaatgcgaaacagaaaacaaagatatcctacaaagtacaaacctcatctttctcactttcctcattatttcccgtcttttcaccctcaacccgtttccggtagtattccaaaaccttagcgccccaaacatctctccccttatactcacccacataatcaggccaacttttcatctccttggccagattatccagctcagccattggcagctcatccaacggcgtgagatatgtcttgacaccaaagacgatcgcccccgtgcgcggcagacgacggaaagtctgtctctcgcgacggatcaggatatctgatggcgatgggctgctcagctttttctcacagagggagttgggccgatagaggatgtcggtcaggttctcgtttggttccttgacttctacgaagtaatttgagcgttccattggagatgttggagttaagcgggcgaggaatctggggagtagggtcagtttcttgtttcttgtttctctgtatggccgtcccctctgatctgatttgaggttacttacttgctgacggagttggcgacttgttggtgccatagtggaacagggccatgcagttgagagatggtccagccaattctctgattcactgtccaccccgttgggaagaggctggcgctagctgccctgtgttggtgttagggttggtaaattgagtattatgcggatttgaacatacaggtagaattccccttcctcgttcatgatcagaatactgagatcctccatcgtaagacgcacagcggcctcgagtgcctcggttgatccctcgttggggtcgcgcccgctgacagtgaatttatcgcctgtcatacgattgtcgacgacctttcgaccattttgaattgacatttcaaacatatttggaaatctctcgcagagaaagtctgaaacttcctccaatgcctcttggcacggttcaattgactcgggcaaacagcgaatgacctcttctcttttctcgtgcagcaattgggtccggacccggtgttcgtctatatagttcttgtccagggtgagccaattctgggcgtcgagtttgcgaatgtccatcattacacggtatcgttctctgcctctgataggctgcgctgggtatggtgccatacgcttgacgtcggatgggttggagacattttttgagcaatgtttccctttcaatttttgtgataaccactggagcagttgtctttggtgtctaactgcgaaaagaaagacgaagattggaatcgcaactagtgagaaggtggccatactttttctcattaaggctccacgtatagatcgaactgttttcttctggagataaaactaatcaagaacgctcaatgtcaaaggaaggcaaagcgaaatagaaaataaggtgaatatcatagactatgaccaagactagaatatataaatataatttcaagacgggctatgaagtcaccatcggaaacaggcaacaatagaagatcaccagactataattctaagtcagcttcactagtcttagccaaaaaaaaaggttagctcccaggtatggcagctgcattccacatgccccattcagcgaagttgtgcctgcggaactgctgtgatacgcccagggattccccgcaaaaaaaaagtcagagttcaccggggagtactgccagccacatgatctcaggccttttttgaaaatcatgatatttgtctgatttttcaaaagtacatcagggctgtgcataaacaatcagctctgagtgttgccggagtggggatgattacaaccaaaccatctctcactggtcgatgatatctcccttaccagtcggacaagagcgcttggagacgactcggcccatagtttctcggaccaactccctagctagggcccctacgatctagacacagagtgccgtctttaacttcaaacaatcgtcaagctcgtataccgcccgtgcgcctcatgaaccagccgcccagggcttgccgactcggaagaaaaaactagtctcgcacgaaagaatttactatgtaggctccggatatcatcggagaggcaatgtccaggagttgatttgaaccgcgtaaggcgcttgccagctaatgtttgtgtccgtacccaaactccgagagtaccggcatgtttggtctggggtcacgcaggtccggccccagctattaataatttgccgtcttggaagagtctacggagtacggagtacggagtactagcatattgggtctgagtggcccggggatgagccggggattcgttccagttcaggtgcacattacctccgagctaggtagatgggcacatggagtttagtctgacgtatcatcgtcatgcctctcgtgggtggagtggatatcaaggggctttttttgcctttcttctccaacgggtccggactctttcgtcacatccgccccgatttaaagattctaggattactggacctcggttttccttggcttcaggttggaagaaagccattgcatcgaatcagacaccgagaataactacactaacacacactaacacactaacactaaaaataaacacaataaaagaagactaaaacagaattttcaagtaaatgctgtcgcaccatgccacaatttaccaacatacccttttaagaggctccacagactccatctggggttcccgctgcaaccgcacatcccccctttcgcgcaaagcgcgtttgccgatattattcttatagtttgggccggaccctcctacaggagtacgcaagttcgttccatttcccgggtctcggctttgattcttgacatgaagattttcctattagctttttattttcgccttctccgtcatagcttcgaagccctaatgcccctgtcgctattccgacaggctattataaccatgattggatcttcaaagcataaatatttgccaccgcttatgatcttcgcaacttgtttgcgcatttcattcctaactacctcgtagacgagtgcgaaatgctgttcatagtattacatgcctcgtactccgcatataatccttttgtttgttacggagtactccgtactccgtacataaactagttcctaatccagtacgtccacacgggccaatcaatgcctccagctagacttgatctaagacctgtgtagagtctggaccgggcccagtctggacctcgactgcatcttccaatcctggaatccttgaaccgttcatcctggatatggatcacagcaattaaagtacaaaccaatgcaaggcgacgggggatatgacaatcgccccgtcaggtcggcaaagccgatttcctttcttttttcttctctcacgcacagacgtttagatcacctgccgttgttctcgctggttgggttgtatattccaaggtggatctcccgtctacccgggtgcctttattttttgcattagtagcgctccagccgagaaaaacatatatttagttaggacttgtctttgccccttttcgagctattacgacttctttgtgcaagcttatgaaataatgatcaatcataagtaaccacggagtacggagtacggagtagaacacggagtgtgccaagcccaccaacacggaattgggcgctaaacccaaaatggaaaacaactaaaaagggaaattcgaaggtccggattacaattatacatgtagaatttgatcaactagagcttcgataaaggcgcagtttgtatcttatttcttactccgagctcgtgtgataaggatctagactgaagcgtagacttgccatggaatttgtcaagccatcttgtggcactgcaatgaatccacgttttcgcaccattctcgcggatagatgggtgacattggtgtcgtcaatagatgcctatcctcgactaaaggaaaatatcaatgtacttctgccaatgacaagttatcgagaaccgtaattagtcaaaaatgaaatcaatctgacctgcgtgactgccatacctccctattcggtccacgacaatggacatttgtccagacttaaaagtagagatacattgcataggaccagtgacgaggactttgaataactggctgatgtctcgttgacctgcaggtttccaaaacaggaccatcgcaggtcaggatgctgagtagacctagcgtcatcttcacttggcagacagtcttatgcttctcaatcgagcaatagcccataaataagtctcaatgagggtgaacgcaatcaggataactgcaaagcccgtgacaatatagtccaatagcatctttagctagcactgtaagtagagaagaaggtagaaaggctttggagataggtctaaggctttctttcaaaagaggaaatgtacacatatacgtataaaaagttgctcagagaacaaatggagttccaaattcatctcggtgtattataatctgtgactatcttcttggtaagccgattcatcttccaatgggattaagagagaaaaagagaggttcggaacttttgtcccgagtcagatgaaaacttacgttctcattcaatcgccctaacaaagacaaaagtacttgtttagtggggtgatatctgtccaatctcatgtttgacacaaatcctacaacactcttagaagcacaatctaccctagattctattgcacaactctagcaaaacctctattctacatagagtacagatattcagtgtatcgcttgagatagaagatgtttccacagagctgaagcgagaagataaaagcctgaggatggatttccgagctagggttacatatcacggcgttgaaagtgctgatcctcctgctacaagtccagtcacttttcacaccagtatctttcacgatgacaacttacaggttgtattatcgtcgtcgtgatgaagatagactgtgggaatactgttgaccttgcaacatgtgtctactatttgtggacgagaaagatgtttaagttaatgttgccgctagtgaagactttgtcagtctccgacctggcgaaagcttgattgtgatagtttagctcgatgatgacatctggacttttcctagtgatctatagctaggggatgtattccggtttgcgttcaatggtaccacggtagattggtgggattggggtagcaagaaccagacccatactcagacggtggtgaccacgagtacttacgtttccagcagagtcattgacccagctgataataatggcaagcctgaaatagtggtgcctccttccaaccaggtcgagtttacttttgccgtttagatgtattatatctacaaatctaggcagaaggttaccaaatttgcatgaatcaacttggccatcaaattaagtggttcgtacaggacaaaagataagatgtatgacactgtcatctgacataaattaagccagccacctgtgataggtggcgggtgaacaaaaagtgtaccgccaaggttgttgttcaccaggatgggcgttgtgcaaattagttctcgctgaatgttggtcagttcatcgatatctcctatgttgccagatggtcgaagcttgacctgccctaaattggcctgacaaaattcattcatatattttacgaaccgcttctgaacacctgggtttaatgtaagcgggtagagatcagtcataagagggaaaatacctatcgtacctttgggtacctttttgtggttagttgaaacgagctcgggagctttgacaccgctgaataggttgatgctcacctctaacacctgcttcctatcagttggaatgccttgagtaaattccagacccccttccataacggagattaggtcctcaatcattctttgggccataacttgatcatttttcaatgcgccactatcaaagccgggcagattcccaaagagtcatggtgtaccgtcgttgatgaagatgtcaaagtgtggagatatcaaaaggcgaaggtgtcaaaaggtgaagctgtcgtggttgaattcgaaggtttctcgaatagctatccttaattggtatgggaatatgtatatggctttgtttttgacgaatctggatgtatctttcgggcgtattcgagatatctctagggctatatacctagctaatacctatcaagcaccatgccatgctagcattgacttttgtggctattctctttgtattgtttcaggtctgctgcgagcacgcaattctacctaagccagttatcattaagtgaagacggacttcttatcgagatattagaaggctaattacttctaaggttgaggaggctactagaagattaagtcgttacccaaccttttaggtgtcggatcttgggaggtgtaagctgacatcactatggataaattttattagaccaagcaaaaacctttaagaaacatccttcaccctcaaattcagataatacgtttaaatatcagagatgccattttctttcccccgtcgtaaaagagaaccgagccgggatcgagtacatagaaaagtcggaatcatgaggggcgataaagacagttgggaagtcggtctcgaacgatctggggagataaatattctccaaagatatcgcttaagtgaatactggacgctgatcagaagagataacactgggcctccttttatctcacataagcttctctttgtagaggaagacctccgggaaatttttcaagaggagatatctatcaaagagggagccgacttgaacaaagatgccaaagagagacttgatgctttaaatgccagatactggctcttagagcaaaagtgctggcattatcattcctgtctggcagatgggtatcagctaagagcgtttgagctatggcggtcccatcccaaatggtatatgcaccgcgtgcttgttgaagattgtgctagccggcatggctgtgctcgtggatgtgggtgttgtcttagccgcaatattgatcccacgcgccgtcttggagttggacattgtacttttgaatgcggatgttatcgcagagctcgaggctttgacgtttctgaagaagacaaaaaattgctgaaagaacagtgccgcgaagaaataagcaaacttactaagcaccggatcacgcgagtcgccatataggggcttgtcggtgatagctatgagagcccgtttgatatgattgatgcaccaccaagctacgagcagattgcgaaagacaaggcttccacaaaaaagaaggataagactcgctgactggcttcaatcatggatattgctgcatcttgctcactatactgttgctgtgtacctacccgattaagctcttacatcacattgcaggctcataccttccctacaagccattgcttcccccgtagtctacaaaacaatcttgtagcacacgtaagaaattcaccttcacatcattttgctacataatagctatcttcaagatgactctgttaagccttttgttattgtcttgtttgactctttccttcgccggtaagtttgatctcttttcgggcgtctttccaggcgtcttttcagctgtctcttcagctgtcttttttggccactttctgacatttattttttagctcccgtcccgctgcgcccccgggacagcgaggagagccttgccatccttgaatgacggccaccgcgcgtgacgtcctgtggctcgtcgtggccttcctcctggccgtaaaggccatcaacttcctgttctggtgggccaagcgggaggtgaaactgtatgtcaattggtcgcaccgtaggctgtagaaacaatatgctgaccgttgatgtagctagcgactcaagaaggaggagcagcccaagaatgaatgagaaggggggggnnnnnnnnnnnnnnnnnnnnnnnnnnnnnnnnnnnnnnnnnnnnnnnnnnnnnnnnnnnnnnnnnnnnnnnnnnnnnnnnnnnnnnnnnnnnnnnnnnnnnnnnnnnnnnnnnnnnnnnnnnnnnnnnnnnnnnnnnnnnnnnnnnnnnnnnnnnnnnnnnnnnnnnnnnnnnnnnnnnnnnnnnnnnnnnnnnnnnnnnnnnnnnnnnnnnnnnnnnnggggggggcatgtgaagggaagggagggggggcccccgggggagtggaggtatttatattttttgatattgtatataccaacctggccttgtaaatatgatgcgactacagtgtagtgatgtaaattgatagagggagagagttgtcaattcctaaagggcagaatgcccgactatctagttggtacctgccgtactgggctgatggtcaggtgaccaccatgtccaatacacccccctaggtataatcccgaggaatgcactcatctgttgttatcgtttttttttttttattgggcagaaactatatcatctagtataagttgacacggtgagcgggccgccagaaacggctcccattgcaccaccctcctgccatcctcgaccgcctgcccgtctccgccatagccttgccccttcgggtttggcgccctcatcttgtccccctttggtttagccccgtccctggccgcttttaccgccccggccatctgccatgcatctatataacaccgctcgccctctcccctcaacttgtcgacgcactttcccttctctttccctctctaccccctttctttctcgccctttctcgcccccaccctcgcctgcggattggctttcagcccgatgcactgcccctttcattttaccggagatgccgctctatccgacgctcagctcgttctggtcggcatgggctgccgtgccatccagtcgcccaggagcagaacccctgggatgatccagcccgcagccgcatcgttcggtcttgagtcgatactccctcttccttctttcctaggggagtggcagtgcatcgtgctacgaagctatctaggtcgccttctctgctagagcgctttgctcgttgagcgtcactcatttcaccggcctctatcgcatctgcaaagctctggcatactatcttcgatgccgtaagccccgctccattcgccccatctgaggttacattgcacagcccctattgtcgcagcacgactctccgttgcctcgtcgcgaatcccgtggcgcccagttgtcgtcatcatcggtctctccggtctctccgcatccaatcgatgaattccgaaagcacagcgcagcgatatgggccaatagcaagaatgcctcgcacgcgcctgacctcggtcgacgatacatcatacggccaataccggacctcgactgcggaaaccgcaccatgatcacacctttacctaccaaatagagaacgggccgacgactagtgtagggcatgcatcgcaaaggtcgtccgcaaggaagagtagtggtaacttttgccggtaagctacaacccttggttatgaaactggtgtggtcccgcgtcttagatgcagtggcctggatttcaggagccggtcgggatcttctacgctgtggagaaagcagattccgcctcacgggcgaccgtcgtctataaagagactacagttccacccaaatggcaaaactgtaattcaaaaccccttcaaattctcctctcccctacaccctgccccccatcccctatcccccatcccctatccccgatcccctatcccccatccccagttctctattctctgccagtttccctgttttaggactacccacaaccaccacatctcgaagactgtctccgccaattcttccacacaatatgtcaaacactagttttcgcctggaatcctttcggccatggaatcctttccaggactctcccgatatttgccgctacccaattcctgtatcgatgaccgccaccctccctgtcttcaatcccgtctcaaagagtcaagaaagtcatccctataaacctggccagcatccacttcctgcgcgacccccgttggaggtttgcttgaatggcagtctacattcggacgctcaaacaactcgacacgagccggaggatttgggctgcaccaccttccgtcctcatgctgagactttcgactctgaaggcatatcgcaattgcaagatataccaggcaccaaagaccttgcttctaccacaatgcccgatattaattgtctgggtgctaagcatcgatcccccggttttggatcgtgcgacttggagcctgccgttattactgggcagcaccagcaagctgtcgattccggaaaccctacccagactggagagcttccagaccctgaaacaatcgatcccgcaatcctagacgatcatgtctttccaggtgatgagcagacccaagcaacggaaaatatccccggcatcgcaacatgtccaaacagatgtctcttggagtgctcccactctccgaaccaagatccacctcttgaatccagacgacaaaatgcaaagggaacggctgttcctggtcgtcggtccaaagtaaataaacgtttgagtgctaggaagagatcttcaaaacaaaatgctggtcagtctaataaagggcctccttgtcgcagcagcatttcgtttcttgccgttcgtgctcaattttcggcccttcccgtcgaagaccggctagagttcctgtcctggttgtttgagagtgctttacctcgttgtatttctacgccttcgagcagagataccactgtatcaagatacatcgcaaaccaagattcagacatcacatacgactgtgaccagccaagcccaaatatcgaaccagttgatgctcaacatacttcttgtacgagaaaaggtttaccgtggtccgtggaagaaagatctttattggtgaagctcagggaagaacagaatcttgcttggtcggaggtgacgagacagtttgcacagaaattcgccgggagaagtcaagggtccatacaggtgtactggagcacgacgctcaaaaaagagcggcgatctttggtggctgccacgtagaaaatgccatcctaatcgatacttagaccattccctcgttttctcatgcaccacaaaccacaacgtaaataaattgaggactgtgaattcaacaatgtagttgagtattggtggtccaagtacacagttccacactacggtacagcgcttccggaaactggtgtcactgcaattcgtgccaaattctcggccctttcagtcgaaaactgactgcagttcctatcctagcttttcgagggtgcgtgaactcattgcgcttctacgccctagagcatcgatgctgcttctccatcaagccagcgtgacgacataaccgacggctgtggtcctgcgagcttggacactggggtatttgatgcgcagcatacctcaagaaagggactacggtggtcggtagaggaagatcactctctaatgaagctaagagacgagcaaaacctcgcttggtctgaggtggtcaagcaattttcacgagaattccccaggcagagcgaggggtcaataaaagtgtactggagcacagcaatgaagaaaagacggccatcttaccccattgttctcattgcttgacatagttaatcaatattgagatgctaacgtaattcacccccaagcggcgcaccccatccaacctattgaatttaagtgcatatatttcaaccagaacgccattaaattaattaaactaaaaagaatcatttatctggacacctattgatcttatgcccggttcttccacacccactacactttgatgcagcccgtggacgtggttctacccccggttgagggcttccgcgcgtggggggggggaggtgcttcagatgcttccaccaactcagtaatcaattgagaagcttcctgaacagagaggccttcatcggcaggtatctgcctccgggatctagtactttttgcttttgcttctcgttggcagcgcgtaattcgcttacttctttctcaagaaaagcggcagattgcatggtaatctggcaggcttttaaaacctggttaattgccgaactaagcgggctcggagggcttcttgatctcatccgaagcaatgctttaatagacgaagcttgcttttgtaattgaatgtagtttgatggcgtttttgggtcccaatcgctatcccggcttaggggggggggtaggtgttcgaagacaaatattcagctttgaaagtacccgatcgggtgaaaaaggtattaaaccggctgctgagaagctatttttaatcgtctccgatttaaaagcttcaattcgtgcagaggggtatgcttcgaggaagtcatgtttatcaatatggttgatcctggtccgcatttgcatctcaaccaaccggccgtacgaccgttttaccaccgcaaaacaaccaatatcaagtggttgtaaaaggtgagatgaatgcggtggcatacaaattggtatgatcttgttttgcacacaaatctcatcgaattttggggttaaatggcttccgtggccgtcgagtactaaaagccgatatacccccttcatacgagaagaagtagctggaataaagagcttttgtagccaacgaaggcctatttcatctaacgtccacccatttggactaacttcaaagcgccagtcgccaggaaggccttcaaaccatgattcaaggaagaccttgcctttgaaaataatacacggagggagggcccaccccgctgcatttagacattcaattgtagttacccactcgcgatttccaggttataaaagtgatctccgaccgtagtattcacttcttgttataacccttaccgttgcagttaatcccattgcgaaaccagtctcgtcgaagttataaacatcgtcagggttgattccaaattaaaggatagttttttgaacgagattaaaccactctccaataatcttcggatcttcatacttcgcgcgctcgtaattatagcgtctcgagaatcgggaggaaaggagagggtgccgttttatgaattttgtaacccaattttggccaaccgaaagaactagggtagttccacgctttttgaggagaagatccgccatttctcgtaccatagagtgtcacgattggcacttgcggaagtcgtaccttcccgtttgtttgtacaagaagtcgtactttccttccagggtaagcgaggatagggctatgcccccaaagagtataaagaccccacagatgctttacgtttgttttcttttcttttccttcttcatacttgatatttcagttagaaatgcacttctttatttgaaagaacctggcaggtaacatagagggccgcggggctgctccacaagaatccatagagagaatccatttttcaagtgattcctcttcaatttgtgtcaatttacgtgaattggcgcgagaaatcgcgaggttttgtatcccactaaggcagcggcggagggtagtttcgggtacatcaaaacggcgcgctacttcacgaattgaagagatttcttgattcttaaaagcctggatagctagtaagatcctaccctcttgctctactgaatctttagaggannnnnnnnnnnnnnnnnnnnnnnnnnnnnnnnnnnnnnnnnnnnnnnnnnnnnnnnnnnnnnnnnnnnnnnnnnnnnnnnnnnnnnnnnnnnnnnnnnnnnnnnnnnnnnnnnnnnnnnnnnnnnnnnnnnnnnnnnnnnnnnnnnnnnnnnnnnnnnnnnnnnnnnnnnnnnnnnnnnnnnnnnnnnnnnnnnnnnnnnnnnnnnnnnnnnnnnnnnnnnnnnnnnnnnnnnnnnnnnnnnnnnnnnnnnnnnnnnnnnnnnnnnnnnnnnnnnnnnnnnnnnnnnnnnnnnnnnnnnnnnnnnnnnnnnnnnnnnnnnnnnnnnnnnnnnnnnnnnnnnnnnnnnnnnnnnnnnnnnnnnnnnnnnnnnnnnnnnnnnnnnnnnnnnnnnnnnnnnnnnnnnnnnnnnnnnnnnnnnnnnnnnnnnnnnnnnnnnnnnnnnnnnnnnnnnnnnnnnnnnnnnnnnnnnnnnnnnnnnnnnnnnnnnnnnnnnnnnnnnnnnnnnnnnnnnnnnnnnnnnnnnnnnnnnnnnnnnnnnnnnnnnnnnnnnnnnnnnnnnnnnnnnnnnnnnnnnnnnnnnnnnnnnnnnnnnnnnnnnnnnnnnnnnnnnnnnnnnnnnnnnnnnnnnnnnnnnnnnnnnnnnnnnnnnnnnnnnnnnnnnnnnnnnnnnnnnnnnnnnnnnnnnnnnnnnnnnnnnnnnnnnnnnnnnnnnnnnnnnnnnnnnnnnnnnnnnnnnnnnnnnnnnnnnnnnnnnnnnnnnnnnnnnnnnnnnnnnnnnnnnnnnnnnnnnnnnnnnnnnnnnnnnnnnnnnnnnnnnnnnnnnnnnnnnnnnnnnnnnnnnnnnnnnnnnnnnnnnnnnnnnnnnnnnnnnnnnnnnnnnnnnnnnnnnnnnnnnnnnnnnnnnnnnnnnnnnnnnnnnnnnnnnnnnnnnnnnnnnnnnnnnnnnnnnnnnnnnnnnnnnnnnnnnnnnnnnnnnnnnnnnnnnnnnnnnnnnnnnnnnnnnnnnnnnnnnnnnnnnnnnnnnnnnnnnnnnnnnnnnnnnnnnnnnnnnnnnnnnnnnnnnnnnnnnnnnnnnnnnnnnnnnnnnnnnnnnnnnnnnnnnnnnnnnnnnnnnnnnnnnnnnnnnnnnnnnnnnnnnnnnnnnnnnnnnnnnnnnnnnnnnnnnnnnnnnnnnnnnnnnnnnnnnnnnnnnnnnnnnnnnnnnnnnnnnnnnnnnnnnnnnnnnnnnnnnnnnnnnnnnnnnnnnnnnnnnnnnnnnnnnnnnnnnnnnnnnnnnnnnnnnnnnnnnnnnnnnnnnnnnnnnnnnnnnnnnnnnnnnnnnnnnnnnnnnnnnnnnnnnnnnnnnnnnnnnnnnnnnnnnnnnnnnnnnnnnnnnnnnnnnnnnnnnnnnnnnnnnnnnnnnnnnnnnnnnnnnnnnnnnnnnnnnnnnnnnnnnnnnnnnnnnnnnnnnnnnnnnnnnnnnnnnnnnnnnnnnnnnnnnnnnnnnnnnnnnnnnnnnnnnnnnnnnnnnnnnnnnnnnnnnnnnnnnnnnnnnnnnnnnnnnnnnnnnnnnnnnnnnnnnnnnnnnnnnnnnnnnnnnnnnnnnnnnnnnnnnnnnnnnnnnnnnnnnnnnnnnnnnnnnnnnnnnnnnnnnnnnnnnnnnnnnnnnnnnnnnnnnnnnnnnnnnnnnnnnnnnnnnnnnnnnnnnnnnnnnnnnnnnngccaactcagtaatcaattgagaagcttcctgaacagagaggccttcatcggcaggtatctgcctccgggatctagtactttttgcttttgcttctcgttggcagcgcgtaattcgcttacttctttctcaagaaaagcggcagattgcatggtaatctggcaggcttttaaaacctggttaattgccgaactaagcgggctcggagggcttcttgatctcatccgaagcaatgctttaatagacgaagcttgcttttgtaattgaatgtagtttgatggcgtttttgggtcccaatcgctatcccggcttaggggggggggtaggtgttcgaagacaaatattcagctttgaaagtacccgatcgggtgaaaaaggtattaaaccggctgctgagaagctatttttaatcgtctccgatttaaaagcttcaattcgtgcagaggggtatgcttcgaggaagtcatgtttatcaatatggttgatcctggtccgcatttgcatctcaaccaaccggccgtacgaccgttttaccaccgcaaaacaaccaatatcaagtggttgtaaaaggtgagatgaatgcggtggcatacaaattggtatgatcttgttttgcacacaaatctcatcgaattttggggttaaatggcttccgtggccgtcgagtactaaaagccgatatacccccttcatacgagaagaagtagctggaataaagagcttttgtagccaacgaaggcctatttcatctaacgtccacccatttggactaacttcaaagcgccagtcgccaggaaggccttcaaaccatgattcaaggaagaccttgcctttgaaaataatacacggagggagggcccaccccgctgcatttagacattcaattgtagttacccactcgcgatttccaggttataaaagtgatctccgaccgtagtattcacttcttgttataacccttaccgttgcagttaatcccattgcgaaaccagtctcgtcgaagttataaacatcgtcagggttgattccaaattaaaggatagttttttgaacgagattaaaccactctccaataatcttcggatcttcatacttcgcgcgctcgtaattatagcgtctcgagaatcgggaggaaaggagagggtgccgttttatgaattttgtaacccaattttggccaaccgaaagaactagggtagttccacgctttttgaggagaagatccgccatttctcgtaccatagagtgtcacgattggcacttgcggaagtcgtaccttcccgtttgtttgtacaagaagtcgtactttccttccagggtaagcgaggatagggctatgcccccaaagagtataaagaccccacagatgctttacgtttgttttcttttcttttccttcttcatacttgatatttcagttagaaatgcacttctttatttgaaagaacctggcaggtaacatagagggccgcggggctgctccacaagaatccatagagagaatccatttttcaagtgattcctcttcaatttgtgtcaatttacgtgaattggcgcgagaaatcgcgaggttttgtatcccactaaggcagcggcggagggtagtttcgggtacatcaaaacggcgcgctacttcacgaattgaagagatttcttgattcttaaaagcctggatagctagtaagatcctaccctcttgctctactgaatgtttagagcttcgggagcgaattggtggcatagtgggtggttgaagaaggagggtttaagttaattgacgcgttttggatggggtgcgccacttgggggtgaattacgttaccgataaaatcatctagaataactaaagtgttaggtgtggggttgaccaattgcataagatgcatagtttaagaaggctaaaataatatatcgtcgccacgcataggaggtggaaatcgtgggaccaggcttttgaatttgatcggccatcccaaattttactcctttatgcttcaaggggtcgaatccagtagggtattcctctccaatgggagaggtacgatcaaagctgatgatagagatggccaatatcgaaggctgcatattgtacgtagggatacagtctcaggctgaaagggatctcgctagccagtattgaaaatggcccatcaatgacaagatggttgggttgattgaggatttgttgggctacgtattgggtgttacgacactgttcttccggtatgttgagatttaccatacataacacgtcggcgttgggtgatactgaatgaccttgtacgacaatacaatgcggggaactcacggtattttacccctcatgtgatattacataagcttggcggctcagggtaggctcagggttggttcagggtaggctcagagttggctcagggtaggctcagggtggcttgggtagggtcaaattaaacaacgtctcggtgggccgactgatgactacgttgtaaattatgaggaatcttgacgttatcatcgtgtctccccagctcaaaaagcttgtagtaaaaaagaaaacaggagaaaaaaatccttcccttgcatttatgagattcctttattctatagaggattgactagtcgatatcctacggctgaccttccgaaggaacgtagagaaaaaaaagcgagtgatgtctcaggggatgaaagtatatatcaataggaagtcggatttttctctggtcagaataagcggcggcaacgggtttgccttaatttgtctaagttgtcacgattggcacttgcgggactcgtactttcccgtttgggattgtaccgttggtcgtttgcgcaggcagtcgcaccttccttctgggggaaacgagaatagggctttgtccctaaaggggtataaaagcctatttgttgttttcacgtttgtttcttttcttttccttttccatacttgatattcgattagaaatgcacttcttttgttaaaaggaatctggcacgcaatttagcaatgcacttcttctgctagaaagaacctggcacgtaacataagtaagattaagacgctctggtgattgcttcgaaaagagactcatacgatgtcgcatgtcaatagcagtgttgaagccggatgtatgtaaacggccctgtcggaacacctacgagcttctagagctgtttggagatatcatataatactgagggcggtgcaaaggaatctcttttcttcagcacatggctttcgatactgggccagaagtgacacggcaaaaacgacgaaggagatagcgggaaataaatgaatgtaaataataatatacagaatgtgacgatctgggaaggatcgtacttgccaaacgaggcaggaacgactatgccctcgcaccttcccaagtggacgaacgagaattaagcgagacaaacgcaagggtataagaagggaagaacgcgcactcagatagtttctctttttcctttcttcttcgtacttagaatttggtttgaattacactcctttcttctgaatcgaattggctcgtaacacagaatatgtttgccattgactcaagatacagaggtatagagcctcgagatgaataatgaattgcaagaacaaccatagttgactcgagtctatataaaagacttagcgcgagcgcgagaagacaagcgaaagatacactatgtaggtccgacatatcatctctcctccacttctcgtgtatgccctattgatatccctaacagctgacgaaactcccaggatacttcatttttgatacccaaggaactcacctgtcaagcacctgtcaagggttttgtcactgaccaaaccttgtgcccttttggccagctagcataagggacggcctgagcacttgtggtctgtcgtgactctacaagccattcttcaggtgccactataattattctgatgaatggatagtactctgagaaacataccgattacttacaggacgaacgatgcacttcctaggagcttatgatccacaatccggctaccaagaaatccggcagcatattttaattaagcataatttgtgagaccaactggtattataagtagtgtttctcatcttaggttttcactcgtacccgtttagcttctcgttgtctcaagcgtattgctacaacaatcacctctgtatactctattctttgcctcaaaataccatcccaccactcacaaaaactgcctcgcagcgatacggtttctgcctcttggaagaacatctgaatgattcattccagtgtcccagagtgatcgcctattcagttgttgtacctacgccgccgaatagctactacgcattttacttcacaagtccagagtaaggaatacgatatttgattcccccacaagacctcttcgtccctgtcggccatgccgcaactcaaaaatccgatgcaaccgtgaagtttctcattttcaagcttgtatcaagcgaggtaaaagctcgttgtgtgtctatgagatgagagtgctaaaccaaagttctgctcttctaggaccagccggcaaaagcaagtgcaggaggatgaacttggcgagcatcacattccatagaaggcttttgggtcgcaacccgaatagtatttgcagcacgaaaagaggtactacaagcgaagagctgcaacacactattgagccttcagatgaagcagatatcaagcacttggatcaaagtcattctaggaggggcgatttggcacctcacgaggcgttaccaaagagtattgcggctacaaatgcggaggaaactttgatttcctaactaaattatggccgtgcagctgttgaagttattcttaaatggccacagcatatcaggatctcaaacaacaaagctatatgtacagatgacccctccggtagccaatatcaacccgtgagaaagctaagaccacaaggctgactatcgataagactttgtcagaatctaggatgaatactgtcatttttcatccctgatacagttggatcacgtgactnnnnnnnnnnnnnnnnnnnnnnnnnnnnnnnnnnnnnnnnnnnnnnnnnnnnnnnnnnnnnnnnnnnnnnnnnnnnnnnnnnnnnnnnnnnnnnnnnnnnnnnnnnnnnnnnnnnnnnnnnnnnnnnnnnnnnnnnnnnnnnnnnnnnnnnnnnnnnnnnnnnnnnnnnnnnnnnnnnnnnnnnnnnnnnnnnnnnnnnnnnnnnnnnnnnnnnnnnnnnnnnnnnnnnnnnnnnnnnnnnnnnnnnnnnnnnnnnnnnnnnnnnnnnnnnnnnnnnnnnnnnnnnnnnnnnnnnnnnnnnnnnnnnnnnnnnnnnnnnnnnnnnnnnnnnnnnnnnnnnnnnnnnnnnnnnnnnnnnnnnnnnnnnnnnnnnnnnnnnnnnnnnnnnnnnnnnnnnnnnnnnnnnnnnnnnnnnnnnnnnnnnnnnnnnnnnnnnnnnnnnnnnnnnnnnnnnnnnnnnnnnnnnnnnnnnnnnnnnnnnnnnnnnnnnnnnnnnnnnnnnnnnnnnnnnnnnnnnnnnnnnnnnnnnnnnnnnnnnnnnnnnnnnnnnnnnnnnnnnnnnnnnnnnnnnnnnnnnnnnnnnnnnnnnnnnnnnnnnnnnnnnnnnnnnnnnnnnnnnnnnnnnnnnnnnnnnnnnnnnnnnnnnnnnnnnnnnnnnnnnnnnnnnnnnnnnnnnnnnnnnnnnnnnnnnnnnnnnnnnnnnnnnnnnnnnnnnnnnnnnnnnnnnnnnnnnnnnnnnnnnnnnnnnnnnnnnnnnnnnnnnnnnnnnnnnnnnnnnnnnnnnnnnnnnnnnnnnnnnnnnnnnnnnnnnnnnnnnnnnnnnnnnnnnnnnnnnnnnnnnnnnnnnnnnnnnnnnnnnnnnnnnnnnnnnnnnnnnnnnnnnnnnnnnnnnnnnnnnnnnnnnnnnnnnnnnnnnnnnnnnnnnnnnnnnnnnnnnnnnnnnnnnnnnnnnnnnnnnnnnnnnnnnnnnnnnnnnnnnnnnnnnnnnnnnnnnnnnnnnnnnnnnnnnnnnnnnnnnnnnnnnnnnnnnnnnnnnnnnnnnnnnnnnnnnnnnnnnnnnnnnnnnnnnnnnnnnnnnnnnnnnnnnnnnnnnnnnnnnnnnnnnnnnnnnnnnnnnnnnnnnnnnnnnnnnnnnnnnnnnnnnnnnnnnnnnnnnnnnnnnnnnnnnnnnnnnnnnnnnnnnnnnnnnnnnnnnnnnnnnnnnnnnnnnnnnnnnnnnnnnnnnnnnnnnnnnnnnnnnnnnnnnnnnnnnnnnnnnnnnnnnnnnnnnnnnnnnnnnnnnnnnnnnnnnnnnnnnnnnnnnnnnnnnnnnnnnnnnnnnnnnnnnnnnnnnnnnnnnnnnnnnnnnnnnnnnnnnnnnnnnnnnnnnnnnnnnnnnnnnnnnnnnnnnnnnnnnnnnnnnnnnnnnnnnnnnnnnnnnnnnnnnnnnnnnnnnnnnnnnnnnnnnnnnnnnnnnnnnnnnnnnnnnnnnnnnnnnnnnnnnnnnnnnnnnnnnnnnnnnnnnnnnnnnnnnnnnnnnnnnnnnnnnnnnnnnnnnnnnnnnnnnnnnnnnnnnnnnnnnnnnnnnnnnnnnnnnnnnnnnnnnnnnnnnnnnnnnnnnnnnnnnnnnnnnnnnnnnnnnnnnnnnnnnnnnnnnnnnnnnnnnnnnnnnnnnnnnnnnnnnnnnnnnnnnnnnnnnnnnnnnnnnnnnnnnnnnnnnnnnnnnnnnnnnnnnnnnnnnnnnnnnnnnnnnnnnnnnnnnnnnnnnnnnnnnnnnnnnnnnnnnnnnnnnnnnnnnnnnnnnnnnnnnnnnnnnnnnnnnnnnnnnnnnnnnnnnnnnnnnnnnnnnnnnnnnnnnnnnnnnnnnnnnnnnnnnnnnnnnnnnnnnnnnnnnnnnnnnnnnnnnnnnnnnnnnnnnnnnnnnnnnnnnnnnnnnnnnnnnnnnnnnnnnnnnnnnnnnnnnnnnnnnnnnnnnnnnnnnnnnnnnnnnnnnnnnnnnnnnnnnnnnnnnnnnnnnnnnnnnnnnnnnnnnnnnnnnnnnnnnnnnnnnnnnnnnnnnnnnnnnnnnnnnnnnnnnnnnnnnnnnnnnnnnnnnnnnnnnnnnnnnnnnnnnnnnnnnnnnnnnnnnnnnnnnnnnnnnnnnnnnnnnnnnnnnnnnnnnnnnnnnnnnnnnnnnnnnnnnnnnnnnnnnnnnnnnnnnnnnnnnnnnnnnnnnnnnnnnnnnnnnnnnnnnnnnnnnnnnnnnnnnnnnnnnnnnnnnnnnnnnnnnnnnnnnnnnnnnnnnnnnnnnnnnnnnnnnnnnnnnnnnnnnnnnnnnnnnnnnnnnnnnnnnnnnnnnnnnnnnnnnnnnnnnnnnnnnnnnnnnnnnnnnnnnnnnnnnnnnnnnnnnnnnnnnnnnnnnnnnnnnnnnnnnnnnnnnnnnnnnnnnnnnnnnnnnnnnnnnnnnnnnnnnnnnnnnnnnnnnnnnnnnnnnnnnnnnnnnnnnnnnnnnnnnnnnnnnnnnnnnnnnnnnnnnnnnnnnnnnnnnnnnnnnnnnnnnnnnnnnnnnnnnnnnnnnnnnnnnnnnnnnnnnnnnnnnnnnnnnnnnnnnnnnnnnnnnnnnnnnnnnnnnnnnnnnnnnnnnnnnnnnnnnnnnnnnnnnnnnnnnnnnnnnnnnnnnnnnnnnnnnnnnnnnnnnnnnnnnnnnnnnnnnnnnnnnnnnnnnnnnnnnnnnnnnnnnnnnnnnnnnnnnnnnnnnnnnnnnnnnnnnnnnnnnnnnnnnnnnnnnnnnnnnnnnnnnnnnnnnnnnnnnnnnnnnnnnnnnnnnnnnnnnnnnnnnnnnnnnnnnnnnnnnnnnnnnnnnnnnnnnnnnnnnnnnnnnnnnnnnnnnnnnnnnnnnnnnnnnnnnnnnnnnnnnnnnnnnnnnnnnnnnnnnnnnnnnnnnnnnnnnnnnnnnnnnnnnnnnnnnnnnnnnnnnnnnnnnnnnnnnnnnnnnnnnnnnnnnnnnnnnnnnnnnnnnnnnnnnnnnnnnnnnnnnnnnnnnnnnnnnnnnnnnnnnnnnnnnnnnnnnnnnnnnnnnnnnnnnnnnnnnnnnnnnnnnnnnnnnnnnnnnnnnnnnnnnnnnnnnnnnnnnnnnnnnnnnnnnnnnnnnnnnnnnnnnnnnnnnnnnnnnnnnnnnnnnnnnnnnnnnnnnnnnnnnnnnnnnnnnnnnnnnnnnnnnnnnnnnnnnnnnnnnnnnnnnnnnnnnnnnnnnnnnnnnnnnnnnnnnnnnnnnnnnnnnnnnnnnnnnnnnnnnnnnnnnnnnnnnnnnnnnnnnnnnnnnnnnnnnnnnnnnnnnnnnnnnnnnnnnnnnnnnnnnnnnnnnnnnnnnnnnnnnnnnnnnnnnnnnnnnnnnnnnnnnnnnnnnnnnnnnnnnnnnnnnnnnnnnnnnnnnnnnnnnnnnnnnnnnnnnnnnnnnnnnnnnnnnnnnnnnnnnnnnnnnnnnnnnnnnnnnnnnnnnnnnnnnnnnnnnnnnnnnnnnnnnnnnnnnnnnnnnnnnnnnnnnnnnnnnnnnnnnnnnnnnnnnnnnnnnnnnnnnnnnnnnnnnnnnnnnnnnnnnnnnnnnnnnnnnnnnnnnnnnnnnnnnnnnnnnnnnnnnnnnnnnnnnnnnnnnnnnnnnnnnnnnnnnnnnnnnnnnnnnnnnnnnnnnnnnnnnnnnnnnnnnnnnnnnnnnnnnnnnnnnnnnnnnnnnnnnnnnnnnnnnnnnnnnnnnnnnnnnnnnnnnnnnnnnnnnnnnnnnnnnnnnnnnnnnnnnnnnnnnnnnnnnnnnnnnnnnnnnnnnnnnnnnnnnnnnnnnnnnnnnnnnnnnnnnnnnnnnnnnnnnnnnnnnnnnnnnnnnnnnnnnnnnnnnnnnnnnnnnnnnnnnnnnnnnnnnnnnnnnnnnnnnnnnnnnnnnnnnnnnnnnnnnnnnnnnnnnnnnnnnnnnnnnnnnnnnnnnnnnnnnnnnnnnnnnnnnnnnnnnnnnnnnnnnnnnnnnnnnnnnnnnnnnnnnnnnnnnnnnnnnnnnnnnnnnnnnnnnnnnnnnnnnnnnnnnnnnnnnnnnnnnnnnnnnnnnnnnnnnnnnnnnnnnnnnnnnnnnnnnnnnnnnnnnnnnnnnnnnnnnnnnnnnnnnnnnnnnnnnnnnnnnnnnnnnnnnnnnnnnnnnnnnnnnnnnnnnnnnnnnnnnnnnnnnnnnnnnnnnnnnnnnnnnnnnnnnnnnnnnnnnnnnnnnnnnnnnnnnnnnnnnnnnnnnnnnnnnnnnnnnnnnnnnnnnnnnnnnnnnnnnnnnnnnnnnnnnnnnnnnnnnnnnnnnnnnnnnnnnnnnnnnnnnnnnnnnnnnnnnnnnnnnnnnnnnnnnnnnnnnnnnnnnnnnnnnnnnnnnnnnnnnnnnnnnnnnnnnnnnnnnnnnnnnnnnnnnnnnnnnnnnnnnnnnnnnnnnnnnnnnnnnnnnnnnnnnnnnnnnnnnnnnnnnnnnnnnnnnnnnnnnnnnnnnnnnnnnnnnnnnnnnnnnnnnnnnnnnnnnnnnnnnnnnnnnnnnnnnnnnnnnnnnnnnnnnnnnnnnnnnnnnnnnnnnnnnnnnnnnnnnnnnnnnnnnnnnnnnnnnnnnnnnnnnnnnnnnnnnnnnnnnnnnnnnnnnnnnnnnnnnnnnnnnnnnnnnnnnnnnnnnnnnnnnnnnnnnnnnnnnnnnnnnnnnnnnnnnnnnnnnnnnnnnnnnnnnnnnnnnnnnnnnnnnnnnnnnnnnnnnnnnnnnnnnnnnnnnnnnnnnnnnnnnnnnnnnnnnnnnnnnnnnnnnnnnnnnnnnnnnnnnnnnnnnnnnnnnnnnnnnnnnnnnnnnnnnnnnnnnnnnnnnnnnnnnnnnnnnnnnnnnnnnnnnnnnnnnnnnnnnnnnnnnnnnnnnnnnnnnnnnnnnnnnnnnnnnnnnnnnnnnnnnnnnnnnnnnnnnnnnnnnnnnnnnnnnnnnnnnnnnnnnnnnnnnnnnnnnnnnnnnnnnnnnnnnnnnnnnnnnnnnnnnnnnnnnnnnnnnnnnnnnnnnnnnnnnnnnnnnnnnnnnnnnnnnnnnnnnnnnnnnnnnnnnnnnnnnnnnnnnnnnnnnnnnnnnnnnnnnnnnnnnnnnnnnnnnnnnnnnnnnnnnnnnnnnnnnnnnnnnnnnnnnnnnnnnnnnnnnnnnnnnnnnnnnnnnnnnnnnnnnnnnnnnnnnnnnnnnnnnnnnnnnnnnnnnnnnnnnnnnnnnnnnnnnnnnnnnnnnnnnnnnnnnnnnnnnnnnnnnnnnnnnnnnnnnnnnnnnnnnnnnnnnnnnnnnnnnnnnnnnnnnnnnnnnnnnnnnnnnnnnnnnnnnnnnnnnnnnnnnnnnnnnnnnnnnnnnnnnnnnnnnnnnnnnnnnnnnnnnnnnnnnnnnnnnnnnnnnnnnnnnnnnnnnnnnnnnnnnnnnnnnnnnnnnnnnnnnnnnnnnnnnnnnnnnnnnnnnnnnnnnnnnnnnnnnnnnnnnnnnnnnnnnnnnnnnnnnnnnnnnnnnnnnnnnnnnnnnnnnnnnnnnnnnnnnnnnnnnnnnnnnnnnnnnnnnnnnnnnnnnnnnnnnnnnnnnnnnnnnnnnnnnnnnnnnnnnnnnnnnnnnnnnnnnnnnnnnnnnnnnnnnnnnnnnnnnnnnnnnnnnnnnnnnnnnnnnnnnnnnnnnnnnnnnnnnnnnnnnnnnnnnnnnnnnnnnnnnnnnnnnnnnnnnnnnnnnnnnnnnnnnnnnnnnnnnnnnnnnnnnnnnnnnnnnnnnnnnnnnnnnnnnnnnnnnnnnnnnnnnnnnnnnnnnnnnnnnnnnnnnnnnnnnnnnnnnnnnnnnnnnnnnnnnnnnnnnnnnnnnnnnnnnnnnnnnnnnnnnnnnnnnnnnnnnnnnnnnnnnnnnnnnnnnnnnnnnnnnnnnnnnnnnnnnnnnnnnnnnnnnnnnnnnnnnnnnnnnnnnnnnnnnnnnnnnnnnnnnnnnnnnnnnnnnnnnnnnnnnnnnnnnnnnnnnnnnnnnnnnnnnnnnnnnnnnnnnnnnnnnnnnnnnnnnnnnnnnnnnnnnnnnnnnnnnnnnnnnnnnnnnnnnnnnnnnnnnnnnnnnnnnnnnnnnnnnnnnnnnnnnnnnnnnnnnnnnnnnnnnnnnnnnnnnnnnnnnnnnnnnnnnnnnnnnnnnnnnnnnnnnnnnnnnnnnnnnnnnnnnnnnnnnnnnnnnnnnnnnnnnnnnnnnnnnnnnnnnnnnnnnnnnnnnnnnnnnnnnnnnnnnnnnnnnnnnnnnnnnnnnnnnnnnnnnnnnnnnnnnnnnnnnnnnnnnnnnnnnnnnnnnnttgttttgtttgttttgattactaagttgtccatcagattgtcatgttttaggactattgtcagttttagagagttagagaatttattaagatttttctgccacaaaatacactcgccttaccaccgtttttccgtcagacttctttgcctccacggccgaatttcaatattactagggagatataactacggcccacatacgatccaccaactgttgttggtattgaacttccttttcgtctccttgatgctttctctaaatgtaggggctctgtggaaggtaatatatcgccgcgactgtgattgggaagagagctttgtcttacagcacagtcagcttcaagggtgagtggtcgggcggtggaggagaatacctcacggcgggaatcttagtccatcgaattatgtaagtttcttaaacagggggttcaacttttggaaatctatctggttaattacggcgtcatcactgtcatctgcctgcaataaccactagtgtggtaggtaattgattagaatgaaggtatagtgtagtggatatgtcattttcgtaataaatttatccattcgacaggtagacagtatatcgtaagagaattcgtaagttcaataagttttgtaattatatatatacattcgatatgtgagtatcaactgcttttatatattttgaatcacagtttcaacttcatggttgattgtcgtttattaatttccacttaaaatgaacacattcattatacataattttagtcaaataatttgaatatatgtcattatttgacatttacgtggttaaaaaataaaaacgtagtatgaaaagtccaagcgaccgaagtgcgtctttgtaagcgggcccgcccgcgcgtgcgcggaggttttgccatctcacccacacatatcaatttacaccgacccaattgcgtcagtcatttctagttcgcttgagaaccttaccaggcttcacagtttcaaagagcggcaatggtctctctgcagagttgctaatcttctctagcaccgaaacacagttttaatctcacttttgctattggcgacgctgtcttcgactgtaatgtgggtcttgtaaacggcggacctgtgaattactgtatgcggttagttttgcctttcttggtttagcgcctcaatacgctgtcacgtaacccgtaacctacgttgagtgccctctgactaaaatatgtattcgtctcccctacctttctctcacctttccatttttctgcctctctatcttgcactcatcgcctccgcctttcttttactctggcccccaccgactactgcacattt

SEQ ID NO: 63 - DNA, 249331 bp, Penicillium roqueforti
  misc_feature (178692)..(178915): n is a, c, g, or t
  misc_feature (245495)..(246684): n is a, c, g, or t
attttatatgtacttaggctctatgatttcctatatagactctagtccgccagcggctgtaatatcgtccaacgcgagcttccgtagctcggcggaaagggaattcccaactttgcgctgttgtagaatattgagtaatcggccgcgatattgtcctcttcgccaaggtatggataagaggtagagagatcttgccttcatttagatcctctgcgaagccttttttctttgtatactgtcaatttgggtaagcgcagtcaaaaaaaacagaatcaagagttaaaaaaccctgtcatagaaagaaaaggttttcatcatacatccgcatctaggaggtttagatagtcatcacggacttggaagaacctgcctacggccttcatgaagggtgagacatcgaggtctttgttcactgttgcctcggagcgcatcaattcggccacaagaacaaaaaaaccgccggtttctgagatagaataatgatcagcatttaagtgagcgttggggagggtaattgatcgaacatactaccatcaatcatagtaaaatattcctcctctgtcggaaccaccgtctgatttgtccagtgtagatccattccctggccaatgtggccttctatcagtctggttgtgaagatagcagcagcattgggtgacagtttcatcgcagcccttgaggctctcagcagtagaaggtttgcagaattgattgtctggccaatgccaaaaaccaaatgcgtagctgggaacccacgtcttaatggtgagttatcctgtatgtcatcaaccctagttcatatttgtcaatggcccgggatattgacacagcgaagaatcagagaaaatcatacattagggaggaactgtgtagcaaatcggcaatctcttgaatgattataacagatcgttccgggacttgataccagacgtcaagaccatcaattgctgcattcctcaccccctttgacggtagagacttgaggtagacatagggttccaatgcaatctagattctgcttagtacatctccagtatctggaggctgtgggcttacttcttcaaattccgagatatggaggggggtatcgtctctttgattctcgaattctgataacgcagggctgatgggtgcattgctagcttcaccattcgtgctagatcctaggatgttcggggaatcaagggtttcgaatcccacaaaattatccctttttgcaattatcgtaagcgatgtgattggtttgcttaggctgctgaaaggatgagaggctttctttttctgactcacaacccgcaaacccggatacgcatcttcaacgtcatcgtggtatcgtgcagtggtcatgctccacgcaaagttcccagcagtcacaatgtccagtaactcaaaccatttgattatgctttttgtcacgtttccacgagcgaagtaatcggccttgagctggcagtacctttcctcgcgagcaataatctcactccggagcatcttcttagccgtggtcggatcgatgttatgccacttcatgaaaagaaagactgcgctaacaatctggccggtgcttccgttggattcgtagttcttgtgctctttttcccaggaaaagtagtcattcaccagaacccaagcatcatatgcggcacttgtaatgctggaagtttgtgcggtctcttcagccgtgaggtaaaaatccatggaaaaacacatcaaggccatggtccacctattcagcgcagttagctgagaatcctcactagggctcgctcgaaacatgatatcttacgggcatcctgcatcaacagcgcggaatatgaaataatcttccaatgtttgaaagtcaagatctctgatatccacaaacacgtctgacatctccttccagagacggagaataacctggccctgttctaagtcgaattctagaagctccgtagccattttagcttgcatttgtctcttcaaattgcttctcgtagatagttttccatccccatactcctcgaggccttctgtgagttgcttgtttgctttgtagagctgcaaaatgtgtcttgtcagaagaggcaaagataataaatgtatcaaaagtaaatactcacttctgactcgcgtttctcttcggcatattcaatgactgtaatgtttagttggtttattgggccaatttgagcatgacgggggccacttacggtcatcatgcacgtacgtatacttaataatgtatgaaatcaaagcaagccgcttaggaattgcttcaactgcatatagagctgtaaagttaccaacggtcgggttgatacaaccaacagcgtagcttttgttgcttccactccgaaccgctgcagcataagcagccccttaagaacccagaagatccatctgacattgccaacaccctgaatcggcgagatgagtatcacggtggatacaaggagtgaacttgcaaaagtactcttctctcttatatgcttctcggggaactggaagggaatcaggtacaaagtgtctcgtaggatcctgcctccgcggcaatatgattgtcttactcttaaaggatagagaaatcggacgtgatgttttcagtcgggatgatgggaatgacttggaagacatttcatgaggaagtatcatctattaaatatccagttgtgtgggatagaaactgaaaaatctaataataaaaatgaggagatataatgcttatatgtcattagctcgaactattttccaaaactctgtgtctatatgaatgtgatctatatgaatgggatgttcctatgattttaaatcagatatttatgaccatatatagtagtactactgtatataattccaattattgtgctgtacgcatataatcaaagtttagtagaattatcgtgaggctaatatatacgaaaaaccatgtgatcaaatatataatgtggcccacatttccattttaggataaaacctactaatctagtatacagcttgagtctgatcatctggggctatcgattcaaatgagcatgaagtttcaatccctaaaaagaagttaggatgtttctttctattctaatagtaaaatctttgattgacagtcgatatcgatattcgatatcgatatttttccttaaaaaaagcaattctttatggtttgatgttgtttacaactgtacatgtcacctatgaatttgatagtggctgcctacgatagtctaccctataaagatttacccacttccattttgtttttcttggtgtataaatagcgtggtatataattcaacatacattacacaagtacctgagtacgtcggtatgttaataccgagaggttgtataatatagattgcatccacaggaaatgctatcatgtaatggcgattgttccgccaagaaataaactttttagcgattttttaacaagggaggatatttaaatgtgggggacagtttaacctaatgaactctttgataacctaatcgatcggtatttatttcttgaaggaatggcacttctagataacatgggggtttcttgctacctgacattgattatgtctgccagtctggtaagttgaggctggttctctttaaagattaccttatgtatgcctgttgactgacctcgggatgtatttggtaagttgtggttatcctctaaagctgtttataatatatggtttcatccattgaggaatttccccggtccatggtacaccaaagtatctaggatttggtacgtcttgcgggtcctccagggatgccacaaatatgagattaaaagactccacgatgaatatggcctggtcgtgaggattgtaccagatgaactctcatatattgatcctagggcttggaatggaatttatggtgaaaaaccctcttccttatctttctaaggtcatgaaaatgcactaataaactacaatttgaaggtagcgttgtctataaccatggattatatccgatggagaaagatggggatttttttgcaacagcctttggagactcggaaactcttgttaggatatgctaccctgatttatttatcctaatatttctctgactaatggaaactaggtgggcgctaagagtgcggagtataaagtttaaaagaacaatgctgtccggggcttttcatatgggcaactgcttcagaaagaggatatgatattatctcacgtggaatcttttacccacaacctcaaaatttatctcgaaacgaaaaacgaggatatcatcgatatcgatgcctagattgggaacttgatactcgatatctatgtgaagcttaccataggccacgatttctatactatcgataaggggccttcatcccacaccttggtgagcactatatataagatagcgaaggccttgcagtatattacccaacttctttaccttcctctatccctatcgccccttttccgcttatggatatttcgtcgtgatatctttactatattcagcagacttcctcctttaggaacagcaattactgagcgcctggagcggatgggtaccactgataaccgtgtggacttgggtaagaaagctgtcctgattcctggctctaacttctgatgtaatactcaccgtttcaaagtatactatatagagaatgattaagaggacggcataattgattccgatacgataaaaaggaacgccttgattgtgattcttagcggaattgagacactccctgattatattggttctgttatttactatatgctccaaagtcccgagcattttgctcggcttaggaaagagatacatactgtatttacagtctccgaggacattttagcggaagcagttcaaaatcttaaatttttgaaagcgtgtatgaataagagccttcgcatggctctgccatttataggcaccctacctcgtcgagttcctgcttgtggtgtgtatatttgcggccagtttgtaaagggtggtactactgttggcattcacaattggtctataatgtatagtgggaggttttggaaaagtcctgaggttttctgcccagatagatggatggacgaccctaaatatgaggacgatacgcgtgaggccttctatccgtttggagttgggcctcgaatatgtgttgccaggaagtgggtctactacagcccccgaaaacatatatgagattgctgatcagataccaaatccagtctcgttattattaaagccagtcttatcctcgctcggatcctgttcgactttgatatggagttagagctttccagcagccatgattggccgaagagaaatggtcacctggttccgaacaagcgtccgctatttataagagtcaaagcggacacgggtgaaggaatctagtagatgtttgacccttcctgctaccaaatagctcagagttgcctcggaattttctactatgaagtaaatagaaggatgcttatttagtcgaaaatcggtgaggtgcctctgtttaaatgtacaatccgcaaccaagatatttgttctccacgtctttttcttcagggtcccatagcgaacgtggcgatgttgcaccgcttagcttataaaaggtaatgacgaggtggccttgatgatacgattccaagtatgcagcatataaagattgataaatggtgtatccattgccaatctcttcttattgattcctatagagttctattatgagggcatatcaaactcgctatagaaaaccattggaaaaaaaccattagcagagaaatatcaggcttagatggagtctgaggacactgtgctttatgcagaacacgtccgattcagttaccccctgggcccctgagacctctatggtatggtggaatacgaatattgaatccaacactatgcctgatgtacattctgggtaagcgttttaggctgatcgctgcttatctcaatgaagaacatagaaatatgagacatcagcaagaaaagacctatgcatacctattgcatacctgcgcaagcaacttatcattttcgtgaaacaagcggtgtggatcctcagccagccactcctgaggtctggggtgatccccatggatctaccgaaataaagtgggcgggtggagtaaatagaaatttcggttggcgggcgaaaccgtaaggtgtagctacgaatgcaagatagagtggatgagataatatgaagaggtgtgggaatgaaaggctattgtacagggtttcctgggtgggatatcacatccaaagcccgacccgcatgttaccaccaatgaagcaaagtatataacgcatagtaattcgaatgcgtaactagttagtgaagagggatatacatcattattctcacttctggttaatcacacccttcttgcgtagtctgcgcctccatcatatctgttaaattacatcatacttttcgtactgcaaatttctgtcaatgatcaatattctcatggtcactacgattagagtgggtgacattcggtcggttccccgtaccatatcaaaaatgttcaattatctatcgtaataactagcgcagtaggacagctgaaattaaaatgggggatatttacctatcagaattcagcttaatcggaattgatttaggctctgcagtctagtcaacaaattactgtcagaagtaatggattttgataggcggggggacgggagcacgcagaatggagaatgaggaagcgaagaaaggcagtgaggccgagtgtataaagagaaatcttaagaagagaatggacaatatcgagaaattttagttcgtcctaaatatactcaataatcgatatattgctcggggacccctaaaccccaaaccaatgaggaaatttgttttctctggtgtctacctttcatcgcgcttttttcgagaagcaatgagatagtgtcttgaagagctttaaggagagtttcagaaaacgtcaaattggaaatatactgaataaggtctatcggcagataaagagtaacaatcttccgtcctgcaatgaggttttgttgggtggccggaaggcggtcacccatgtaggtacagatcaccagatagttccgctctctcttcctctctctcttcccctcctgtccatgagaacttagcagaatcaataccagttgtttcctctttacagacacaaagtagtacgatctccattaggttttcctatccttcattgaccgcaaggggctgctaatatacccttggatgctgaaagtttttgagccacgagccaaattttccttaaagtctaaactccctagtgggcttgcaggccgctgctgtcatattccttcggctactacggaacaaattggttctgtcagcaataggctagggtacagtgacgaggagcttgatttcctctgggaagaaagcggcactagtggcaaagattgggatattatctttgacaaatttaaaaagagagtcccctaccagaaatgttcttctcgcgaagaatagaccgggattttgtagtggagcgatatgttcaaaatcaaagcagtgtcaggacctttgggcaatatcattcatgatcccggaaacattaataggttgagtggaaattttttcatggaagcggtacggaaattcgccctcgatacgatcctctgggtttagcgattcggctccgttggcggcgtcatcgacgtttgtaaacctcaagttcgatggaaccgaatcttgtgaaacagagacagggtatctagcgggatgatcggttcttcggaacttctctctccctgattccatccccgaaactaggccatgatagagaatcacttaataaaagttcgcacggagtaggttaagtcgttaaatgaagtcagctcacagttgtaggaattttgcaattgattgaaccatagatctaggtcttgtactagatcgagcagatgtatcttactctgtaaaatcgtgatatgtatactgtctgacattggtatgttcgcaaaacgttgtatttcattatagcggaatacgaaggtgtatagttagttaacggccaacagtcggatgcctgattttaatggttttacagcgtaattaggactagctcctaccagctttaggctgacagaaaattaaaatacctgaattaccatgacagatctgctggcttgaaacttaaaatatgaagctattcatacccaccacagtcctgtactttcccggagaaaagctgacagcgctactgaaaccaaggcccaaaacgtctggaaagccaaccctagattttaatataaagtccctattactaccggccgtacaaacttcaaactctctgtatcctctggctccagcgtgccgaagtgcccttggaggggttgcgctttcaacgactgtaataggaggcggtgatccgaatgtaggagacgcgttgaggtaacttcaatgtgaacttacaaaatatggtattgagcggtgtgaaaggcggtctaaaactggtaactaagagctaactagtcttaattaggtcataaaaccattaaaatcaggcatccggctgttggccgctatacacctgcgtagcggaatcttcgaaattgatctatatgcaacccaacaatggcggaacttgcgctgtaactatatgcttggcagataattttcttttaggcgttcgcaaatgatcttttaaaaaactatatgcttgagaccagcatataaggctttcgagaagaaactattaatcccataattgaaaatgtcgaatttcgtacagcgtaatttaccactagaccataacaaaaaccaaggttcctgtttagggcctagaggggccatatcccattcttgacagaaaacattgatgtcggaaggaattgcagacaagatgtgctgataaatttcctcgggttcgtcggataaacttcatgatccagctgttggtttgtgaattctagagcaatcgacctgagtgcaagaagtctcaagagcttgtcctcgggactgagtattcgatctccttctacgcaccttatgtgctcaaatcgaaggtcatcacagtttcgcttgcgagatagtagctggcttaggaacttctggccagcttcctatacccagcttgctgataactttattcgtttcaacaagtcagggatatgatctggaggtggtttggattccgcggatatatcgctacgccgctaccggaggcgcctttagtcggtatcaaccgggcggttagagcggaaccatacaggctagcgaaataatgtgtttgtagagataggatgccttggttgccaagtgctgtcgtttcagcaatttggaaaggttgagttgaatgtagagatagcacgcttggtaagtccgtaagactcgcttgaaagatatcgacggtatgaggtagtgctgaagacgttagtctaagcgaagcttaccaagctgcgtcaagtactcagtggtctgttttgcgacgcgttctttatcgtccgatatcatctttagccaaatttcactgaatggttaacctcgaattcgtctagtaagaagaaaacttgccccattgtcttcttgccattcttcaatgatttggagtataggcattaaggtccttaacgccagaaacgtgatattggggacttcgaaatttggtagctcggtagaccgtcctttcaggatcaaattagagtctaaagaccatacccctcgattgctgaccccgtagaggaggttcacgtcactctggtaacgacacgcgtcttgacgtgtttgggactagctacacgccgaagaggtattttcggtggtcatttggtaaagaatcgattttttttttaaagggatgtcggattttggagtcaggagcatcaaaggctcttataatgagggccggggcgatcggcgcgacaaagtcatggtaaaacatgtatcatataggataatcattgaaccgtagaatgtcctcgccgatcgagtcgacacaaaaggccaacgagttgttgcctgggggtactggggcaccggtcgcatcgggccagctgcattgtcccgtgacagttcgttttccgtcgcaggcggtggaagatcccttggatgttaggatcaattttgtgtcgctcgttttattgctgatactactcccgacaagcgatggaggaaacaatcgtcgagctgtggcgtcagcttgaggaagagagacaagcacgagaataagaacggagggcgcgagcgagaagagccagagcagcccaacacactatttcgccttctcgatcgccgccaccactctttatctcaagcggttcgagttgagacggatgcgaccctcacggcccagggcgatgcgtctgcccctattaaccgactctatcccaaacgcattgttccttggcttgacttcccccgactccaagagcaactttgcgtcacatgccaactacggaaatccatttctttgaactgaaattccaggcaggggatcagcatttgaccctcgccgttaataatacaacttagcagagcgagcacttccagggcacgattccagcaatattttcagagagcgtgtcttgggcctatctacgttctagacccatgagataatttatcgctatctgtgccccgcgtacgcaatagcccatactaacagacatctcatcaggaatgtcgacgaactgtccgatcatggccatattcttcattccgtctggaatgactgcaggcctgtcgtaatagtcccgccgcaacagaggcgccgacttacgaggcatcacacaggggatggtgatcgaatcctggagtatctcgctcgggaattggaggtggtgcaaaatctcagtcataatttccttgccggagcacttgagcattggcttcctgacatggtccccttctttctctgggaatgccgcgtagccccagaacacctgcacgtcgaccggctggtcagaaaacatgggctgttgcggcaggtagaggtttagcaaccagttgctgttttgaagggtgacaaatgtcccagtgcccggctcgtcacctgtcagctggatgaaactctcaaagaatcgcgtatttttgagcgtcacagtgaatgactcttgtcgggattcacacatacgagtgcaaaagttatatgcgttgccaaatttcgaatcttttgtcgacagctctagccacaagagccagttctcgtccaggtcctgatcgatctctatcaactcaagtgatggtggggagttgttcgtcccggtagttgcgccagacatcactgagcctgccgatacaacgacaatatcctgctgcccgacttcaatccttctctccggttcattgtccttgacagcgcagatggtggacacctgttggtgtgatggatcgataccgatatccgtcacagtcgtgcgaaaacgaaagtcaacgccacgagacaccaggaaatgagctataggttcgataatagcctcgtgggggttgtagcgaccgacgtcgagctggcgcggatgatctaatttgtgggtatctttcatgaacccctgtacatatcgacggaattccacgaggctgtgccatggctggaaaccgaacctattatcagagacatcgtcagtttagtgattggtagattcttccatctatcaacgatacatacgttgtcgctaataacagccagtacttgctctcgaaaaagcctttgtggaaataatcactaatacgagatcgcgatagactcttctccgatttgaaacccagcgtgaccagatccatgtggtctcttagtcccagcccaatgtttttaccgttttgccgttccatgcaggagggttttcggacgagaaatcttgtattagggggttttccaggtggttgtgagtggttgaattcaatcatttcgtctaggacggtcttatttgggtccgtcttcgaaggtaccagcgaaaaaagccgctccatgcaactatcattgagggatggcatggaaccagcctggtagtgataaccattgactgaatcgccagaggtgacagagtcccctccagcaaactccaatcgttcaaggatatggatccgtgagggtggaacactagcctcttgaatgagatgtactgcggctgttagagaggcgatcccactgccaaggatccaggcgtccagattgtttggatcccgtttctctgatagttggttcatggcgatgttaggaatggttgcattgaatttgcatgaatgacagaacaaacatgttgcgccaggaaccaatggtttaaaagcccttgatggtccaagatgtgttgttgtagatgatgtcatttagacttgcggagtccttcctcttcgcgctgggatgtgcgttagctgaagcggccgctcagtacccatggtccacggatcgatccaacgttttgaggtggccaggcctcaatgggtgaccttatttcaattgctatcacgaatgtaagttagtcgtgtgcaagtcaatttattgacgtcatactctcaccaccgtcgtttccgtgtcttcagcgtgcgatctcggaacatgctaatatttttcgtaacaatcaaaggtcaatattttttacaattaactaaatcaattgttaatctgattgttcttcgggttgtttggtctaatcagaaagactaatcccttgggtccgaagcccaactgtctctgcacgagggtgagaaatttgaaaatggatcagaataaagagtttttcctaatattgtacatggaccttcaaacaacaagggctcaggagctcgtgggtaggaccaaaggagggaaagagttttattagggataggagagctcccgactgtctacctacctatgtatgaggtcacaccacaacattggcaagatttgtttcaagttcctttgccttctgactcaagtaggcaccatcggccttgacgtgaccagcctggccaaccataccagcaaatataataattgtggccttcaggtctgcaagatgtgtctgtatcaacattcttgcaacccttgttccaaaatcccctgatatttggtactggcctaagcgaacctctgccgaaatgcatccttttccaaacgcgcagatagaaacacgagtccattccaacaaacgtgccaggaccatattgaccaggagaagcgcttgtggatctcgcatgcaatggtgacaattgaagagagagcgcatggatggaataatccgctgcgactgcgtcaggagcatatcgatggcccgtgcctgttctgacgtttgaggaatggcttggagtgtgcaaaggtgattacttagtgttacaaagcaaccgccggatcgggagtgatgacatggattccccagtagacatgatccagaatgatcggaaagaaatgcatggttgggcctatcattgatagtgttgcatcttaatgattttggggagtatgggaaatggaagggaaatcccatttcagttgcttgtgcgttgtggaacactgcctcttcgtagccaaggttgctgcagttcaagatttttcccgatctggttgatatttctttctcacgcggtgttcctattttctgtcaatgccgtgtatttggcgggatgcttgcccatcagaggggggtaataccagtcaaaccaccgggtagttggaaacaatgctatcgacacccagtaatattagtctcctggggaaaatgaaatgcaaggacagatcagtgtacattatcaatggattcacctgggatagtgggtagccaatcctccatgcagccaaggccactttcaggcgaaatcaattcttgaaagggaagagattctggattgaaagtggatgaaccttggctgtcaagtgtaattcctacattggatggcgatggtagtggactaaataccgagtcttcgtcacaggaaggtagtggtgggatcgccggggtgctgtcgctggttggtggcggtgtatggatcgttaggtcatgcttctccattgactgtttcccctgccgtagacgctcgattgtctttttattcatactgcctcttggctttccgatctttgctttcaaactatagtgacactccaggttgctgttgagagcggggggtggagaattagcaacatatcggatattccaagaagaaagacttactctccagaacaccgtgcgcagggcaaattccccgtgcagcgtactttggctgcatggcatccatcacaagcactgcgaagccttgaagggttcttttctaattgcttggatttccgtatcttgtcatttggcttgattggggaagttgtaccttcacagccaaccagaacagaagtttgagacatcagatttaacgcagagcaaacaatcgagggaaccagtagcctttacctattgcgaaatttgatgtaataagacgcgatggtggctgctggaggcttataagtctgacgttttcttcacaaaactatcggcaactctacaacggtactcccgccttctggcgtccacgaattgcctaattgggcttagaaatgcctccccaaactgttttcgacccattcaatctcatttgacttgtttcataaccgaaaaaatgggggcccaaagctaatcgatatctatctatggatgctcgggcagggcactagggagatggaaccaacccaattcttatatttacgagtcattcttattgacttttgtgcattcttcaaaccactagttatgtgggagtcggataattcgcttttacggtgagagtgtaccaacccgggcactggcttggctgatgttcaagtaaataagccaatgcccacaaatggatacataatgcaggtatagtgtgtgaatttgaatgaggagtagaagagtggaccagctcccaaggtactagccactgggctttatgggctttatctgccatggcccgtctccaaggtcccaacatcccgcagccaccggactttagtcgactttgactgtctccaaggtcctaacagttcgcagttactggacttcattcgatttaggccgtccccaaggtcctaatagcccgcagccaccatgaagtatagcaacgtcaaatgaaacacaccaaatgaagtccacgtgcgcgagtcaaaaacgggtcaaaacgtggaggctaccccgtccagtcaaagagtgaagttcctgaaagagttgattgggttcgcttatcggcagtccttccatgtaccgaaagtgaagaatatggagacaataaaagctaagcccatgtgctttcgcatcgcttgatgccctctggaagattatttcgctgcacttgagcgaattcgattctactcgtcgcattccagcttctagtgaaatgtcaaataacccaatatggtattttgcctatggctccaacatgctttcggatgtcttcatcacgcgaagaaaaatccagcctctcagatccgaagttgctctggttaaactgcaaaccctctgtttcaacataatgggcgttccgtacaccgatcctgccatggggggcttgcgcccagctgaggaacaagatattccggtatatggcattgcgtacctattgtctcccgacgatatgaggaaggtgatcatcagcgaggggtatgcaaattctagaatcctaggcgcatgactagctgaagtatatctaacaccgtagcagaggtggaatcgcctacaaagccgaggtgtttacagccacgttgcaaaatgatgcgtcagaagtgagtgttcatttattggtgggaagacacagtatctcaagaagctacgagaggcttccatcaagaagatatatggtaaatttatcccattacctcgttgcatggttctggtctaacttaaattcacaggatctgttgattcgaggtgcccgtgaacattctctcccggagtcttaccagaagagacttttgtcacagcaaacattcattccggggcaaagttgtcgattcaaggttggaaaatggctatttgacggattctggcaacggatcgcatactggattgaaaaaggagtttacaaattcaaagatggcgaagggaacgttccaccgtggttcctagtcatcttcgattttctcttatggattatgtggtattaccatgactacgtccacagcgtcatttggggcaggggtgatggattgaataggaaatagaccagtgaaataaggaatagattttgacagaagatcaagattcaaattcacttgcttttctccggtatgagggctctaggcaaatccatctctgcatcaggataagcccctctcacaacacctcggaatttctcgttccacagttgcttcactccatcctgcatgattggtacttgagatttgtttgaagctgattgcacttccacatcgttcaatacacggatcacattaagccctatgatcttttccacatccgatcgggcaatcccacgctccagcattctgcgaaccaaatgaggatatcgagcgacattctcaattccttttacagcattaaacataccgtcatagtcagatccaagcccaacatgatcgtagccaatattttgtccaacatgcataatgtgatcaatgacatggtccatgttcccttgggtgggatcaatgtgagcaagagagggaataaatgtgatcataatcactcccttgttggcttttagtttctcgagaatagcgtcggggacattgcgaggatgtggaacgatggaggatctgtacgcttaaggttcagatgggactttcttttgcagcagtctggctgagaaatcgcttgggataacttacgtcgccgagtgagagaaaatcacaggcgctttggaaatatccaacacttggtgcatcacagattcgcttgtatgggagaggtcaatgatcctaattctggttagctttgtgacttttgcgggagaatatatgttgacaagatcattcttacattccaattctgttcatttccctgactatcaattcgcccttagaagatagtccgtcatgtgctggagatattgcggtctagtcattttagctcctgtcacttgttcgttaattggttatcactcactgcgctatctgcgtacagattattcttattgtgcgctaatgtgacatatcggactccaagtttatgatacaaccgaagaacactggagctgtttgcaatctgatggagcccttcgacgccgattaggctagcaaatttcccatcagtgaacaggcgcatgatatcggaggcacgatcaacgagacccatgtggtctgaatacaaatccaccagtcgatgcactagatcgatttgctgcagtgtatctctcaacgtctctaggtgtgccgcatcgtcggtgaagtcgtctgagtctgggctaagaatatcatcagctgaagacaatattgtaggtcgcggtatccaggctaccagtctatgtaaacactccagaaggcaccaccagatttcccttctctgagtcgcttgaaatcaacatgtcccactaggtccttttccggatccaaccgaatatccagttgattgtcgtaaaacccgcgaatgaggtgtggccagtcgttgtgtccatctaggtggattgtcagccttggggtctcgaacatagcccactagcaggacacacaccaatcagtgggactgaattcaggatatcgatggcctcctccatagacatgctcgtggagactagctataattagccaagcgtcgaatgatcccaaggtccgagagcaacaagtgcatgaaagagattattgatcggcaagagaagcaaatgaaagaaaccagagggagtaatatatttcaaaggatcaaggaaatatttgtcaatagtctccgacaaagtctccggggtcgaagactagactgcttcccaaggtactcactcgtgttatatggtgaggccgaagggattgtcaatgctagaccaaaattcttcatccgtccttttccaaattcatctgattttcgtctgtccagtgggagaatatcagggcccctcacgatgacactgaaaaaatgggtgccaccgttccacctaggtgaacggttgggccctaagaccaatcttcgtctcattcttatgacaacaaccctcgtcaactttttggatctttttcaactctcggcagtgctctttggtctcccagacattgaaaaggcgttaggttttactagcgaggatatcaactgggtgcttattgtttacaacattaccttcgccgctttcctcctcatcggggggcagttaggccagagattcggtctggagaagacattcatttccggagcagcaattcttacggtgtccaatatcatcaacacagcggcgccaaacaaggcggctcttcttgccggtcgggcaatttcagggattggggcgggattgactgtgagttgtcgagcacgttgaaatgctccgttgcactgatctaataagtatttcgacttttctcaaggcaccgaacggacttgctatcctgagtagaacctttcccgatggcgatgctcgaaacaaagcactagcaatctacacagcttgcgccccattaggatctaccattggcactgttgttggttcccttctctcatgtatgtcttacagtccttcctcgccagcaattgaattttctgactggaagatctttagcgtctgacgccggctggagatctatattctggctgtgtctaattctcaccggtctggcacttgtgctagcttgcctatttttaccaccctttgccaagacaaacgacactccaatcgatataatggggagtgtagtctttgtgattggaatcgctctactagtgtatggtctgaatgatagcccaagaagtgggtggtcttcagcacctgtccttgtaggtatcattctaggagtgtgcctattaggtgccttcgtctttattgagatgaaagttgccaacccatgcattccaccatatgtttggaaaagcctccctttcttcctcatgcttgtcgctatctttgcttttggtggcagttttagttcgtggttcttcattactacacaactctgtgtcaatctactaggctacacaccggttctcactgcggtttattttttggtaagtctctcgacctcactccaactccactctgctccaagtcaaatattattgatgcagaagcttccattttgattggtacctggctgacgcgcgtcattgaatagcctggtgcattctcagccattgtcggcggagctctatcggcacccatgatcaagcttaccggggagaagatgactctggtaattgggcttgctattacagcggccggtgctgtagcttgggtatttgcaactcctgaccttgcagggggaactggccatggtgagggatactggtactccattgtggctgcaatcatctttgtctgtggcagccctgttgcgatggttccagcccaaagcattctgcttcgtcaggtcgaagcatccaaccatgctatggctagcgcactgttcaacactgcttaccaagtcggggccagcgttcttctagccggtgccaatgccttcatgaatggaaatcgcaagcccattaatggcatcatgatggtctccatgactggatatcaaaacgcattttggcttcttaccggagtccttggaggtgcagcactcgccatagctgtggcttactggcctcaaaaaacagatcaacagccagaaagccttatggaagaatcgaacccagatgaggagcaacaaataatgaaggctcagtgaatcatatgacgcgctggatcaccacaccagatatcttaatttttacaatcctacttgtcagtcaagtgatttatatctgttcatttttctttcttttttatgttcgccctttatcatattagttgaaaattctttcgtgcatctcaagcggctatctctcgatattttctcgagccactagttcctctgtcatccatacccatttccaatgttccctgtatgtacgatcatttaaatatactatggcggggcttcacatgtgggtagaggtctacgggattacgctattgtgcaacagaagtttaaactaaattgctgatgatatccaacccgggcggtaaattggcaaagtaacaaaggcttgaaagccacaaagggacaatggaggtcttccagcccaaatgaagaaaggcaaatccccggtgtcaacccaataatatcaatttgtaggcgtttgtttagaacgccatgttgcgaagttataatcccttagaacttaggcaagattcttcgattgtcaggaccgaagttctcactttccaagaatcctcaagctttcttcgcccaagcgagatgatagtggtagacatttccaacattgcgaagctcgatctccaattcattgcgaagggtatcaaattcctcgctcttaggttgtcccggcttccctattataatgtaattcgggttagtacctaaatatatggacagttcatgggtttgtgatcaacataccactcagcattcttttcattccatcaagcagatgaagcaaaacaaccacagccctctcgccttgctctggatcctctgatgcggctccaaccttgatgacctgaacactttcttggatgtccacagcaccagcaccctgtaaccattgtactaggaacgatcccgggctcggctggttccctatggctgcccaagcattgaccatgatgtcacggaacttgacgaatgctgcatgctcaggcccctcctgaatcgaaagcatgttcccttcatgcaactcaatccaaccgccgggcttgacacacgagaacaacagcttgacagcctcctgggcagtttgatcggaggcgactgtaagaacaaagcgctgatggaccacatcaaagctgttttgaaagtcggcaggccaagggtcgaatattgagtgaagtgaaagatgtaaattcgaaggccgcaaattctccgggaggaagtgctggggggcgatgtcggtgccataaagtgatgtcgacggggggaccgattgggccagatccatcaaccatgtgccctcggcggtggcggagtccaggatacgaaggtttggctgcttgatatccacagggcaatacagaagctttccattcattgcagtcttcacgagctcatgttgagttcgtaggcgatcgtactcaccctggtggcggggaccccgataggtgtctggagggttggattgtgtcattttgtgctataaaagaagaagatgaaatggcgagagtgaattctatgattagagcgagaaaagagatcgacattgaagacagacgctgctttttaggaactttcatatggtttgaaactcagacacatttcggcgactatcactcaatcgaatgtagagaaaaacatactcgccgaggctagtataagaagcacacgacacatgaaaggcccagaatgagctgtaatcattcaatcgtttcttaattttctcttcgcttgtccagttgcaattgattgccatacgtgatgtcccagccaagcgaagatctatccgtgcggcctcaaatccccgatgacaagctagtcttgtacgtcaaaaaatgtaagaaagtccaacactacggtcaaaatccatggcgaaatccagtcaattgatcttgtatcccttcatttatgatcgggatgagccttggtcttcccacttttacggctactaactgcctacagcgagtcccacatccacggccaacgccgtgaagccgctgatgctcattcaggccctgaaaattcctcacgaacttcatatcatcaattcaaccagcaacgaaacatggtttcactcgatcaacccttataagatggtccccgccatggaggacgtcgaaatttaccaggtcaacggcaagccgcagcggctgaacattttcgatagctctgcatgtctaacttacctggcggagaagtacgaccaagagggactttacaatggcaaagacctctgtgaacgaaccattgtcatgaactggttgatgtcctacactgcggggttgggtgcaaccggcaagatttggcttttgatgaaagcaccgaagccagtggatattggcgaatctctttcggtgttgctgaaatacatttgcaccgagtatcagttcctggaaactcggctgaatgaacctggccagcattacatagctttgcccgacagaccgaccattgcggactttgccatcttgcctcttgcgaatgaaactatcgcaacgtccgccaagctggactttggccaatggccaaaattgaaggagtggagtgagaagatgagagagctaccgccggtcaaggaggctttgaatagaatctctcggattggattatccgatgaagagctcatggagctggatcgcaaagattagaactctattgctgtgttcaattagtactccgtatttaaatctcattgacaaggccaggcgcttgagaatatctttcccttcgttattctgtagtcttgggcctactgcatagggacagaaccaaaaggcagaccaaaaggcagactataaggcagaggaaatttgttttcctgttgggatcacgtgatatgcgtcatgtgctcccgagagctttgcagggtttgcatattctcaaggcctgaggcatgaacgcggcacttttggccaggttgatctgccgagcaaatgcttccggggcttcaatgaggatgcatcctaatccggaccatcgacttctctcaccctactccgtactctctctgacttatgaataccaacctcagatggtttgtcttcgtggccctcaaacatttaaaccatcgacgttcttcatttcccttcgttctccttcatacttttcatctatccacatttgacctttcttcgccatcaaaatagtaaaatggactatacttcaacgtccgctgaagaagggcagaggcatctgctccctagaccaagggagggtattcactttttttagatggaattgtacatagatcagtatgtgtaaagaaatatatcatagtacatttgaatgtcaaaacaaatatataattatatatgatgtgaatctggtctatatcaggatggaaaactaacgatatatacactactggagtatcaaattgaactgcaactaaaagagagtcgaagaaatagatggaaatggacaggaaggacttttgaaaatgtgttgttatggttcttatgctcttaggaaaagatcaaagaactgtatggtcgattgtgaaagaaaattacagtggtgtaggtcgaggttgatcgttcattcccttgtccctccagcacacaggtttcttttttttccctaaaaaaggaatagaaaaagtaagatagagtaaggtcgaacgttcaagacagaaaaggagcattattattttaggaaaagaagataacagaatcaatgtattaatggtatgaagaacagcatataacagaaggcggtgaagatgaaatttggtggggaaagaggcagaataactacctggaagcggtgaacgacacaaacgtcctgggcttgccgttctagagaagatccagtgcgatcaaaacggtgttactttgagaaggcaattgctgaggatgtacgttactaggtgtcactacctgaggcatcaactatagcaatgagtttacagaaagctttgtatgtgaatttaccattttctcattgcttcattttcttggctttaggataacacgcgcattggcaataggaacccacgtatcctgaatgggttgcgagctccatgtcttcttggcatctaaccttggtaagtcaatctcgtaccgatttagtaagtggtagacgaaatgtttcaacatagcctcagcaaagtgttgtccaaggcacctccttgttccaaatccaaatgtgaagaggttgtaacggagctaggcagtatgattagcaaaattacaaagtaagctcgtctatcacttctcacctccgttgaagacagatgctgaaaccgatgtggattgaagcgagaatgatcgttcccccaaaatttctggttgtagttgattgcaagtgtatccacaacaacgctcgtctaatgtccaaattagccttcttatttaggtgtgatctggatagaactaacgtgtgatggaataatatagccaccaatgatttttgttcgtggtgagctttcggggatcgtgaatactggtcacaatcagtcagcaagtatcgactggttcttgaaggaacacctcacttgtaaaagggcgaagcctagctgattccaaaaagcaaaattgcaacagcgtatctttcctaccacagagctctgcgagagacccgggatttgccgaaatttccgcccgaacttgttgctgtatgtcaatatcttcagctaagaagatgataagccagctaagaacgtgtgtggacacgtccaagttggcgaaaagcatttcactaagagtctgaagtatctgtgatccagtcagagtccgtgaaggaagtcagaagatcggtcatctcacctcattcatcgaaatacagcccttttccatcgccatccaagcctcaacgataggtggctggtggttatttgagagagttcttgaatttacaagtctctggttgaaattttgccattggttttggaaactcctcaatcgtcggaatgagtgtagcctcatccactgacacaatccgaagcgatacactccaccggaaagaacattccccataagtgcaaggctttgttgacccagattccacagctcttccttttcattttcagtcaaaggcccatagagatattcggcggtagtcatgaacggaaagcgcgagaaatcactggcggcgtgtacctcaaaggactcagcatcctgtctctcaaggctctgcaagtacccagttgccgcgagctcaatatggctagatattgatgacacggagcgatgaatgaaatggtgcttaaactgagcccgaacttgttcccaacggtccccgttgatgaggcccatacagtcaccaagaagctcatggaataaccatccgccgttgctggacttggatttcaggtgggaaggagagtcgctgtgaaagatcttgacgtcgtcgggtctcgtgattacactgtaaaaggtcaatattctgtcatctctctatatcatcgctgaaacacttgcacttcggggagaacgcccgaccagatgcgatagactggcccatattgacgccattctaggctggcttcacgtccccggagaaatttatcgagacattgcccatcactatatttccatcttgggcctttaatattctgcccatgctcatttcgaatgggatacaacaccgtcgatatctgggatttcaaaaaggtgagttgcaaaaatcggtcattatgtcttagggcagaattctcacaattctatcaataacatgatctttcctttggtaaagcttccatattattactataccgaggaaaaggtaaataatccgagggttgaagaattccatagcgaaagatccgccacgttgagaaggtaattcgcgaaaagtgttgcgatacaattggccatgcgcgatgcccatgggataagtttcgattaggaaagatctccaaatgctatgtgtctagtccgtaaggtactccattaaaaccacacttcaacgaatattctccgaatcgttgattacaagcatcactttgccggggaataaatgatcccgagatcaacgatcggccagtaaaaacaaatagagttttattttcactaccaagaggataaagccctaagctcattttggtgctgatatactatttctagagccgttggatttatcctacattgttgctacaaaggtactcatgttgacgtctggatctcagtctacaaaacacaattcagtcgcccaaaagacaatgagaagcccttgaaaagaaattctaaagatctaggatatttatactttagccctagagttataatatacagcacacatacattagataacttttagagtatcttccattcgactaggtacacagggatggaaagtcttcacggctaatcaacgacaatttccctagtaattcaatgcttgcttcctgggtcagtcttgacattttcaacctcggattgatagtaaatttccggattaaagtaggcagtcacattccattgtccttgatcggaagcccagcaaatgtaggtatgaaatcctagtccatcggcaagatcgcggtgtttactgtgagacaactaatcagtgacttgatctcaaacgcaatcgcatcattcgctcaacttaccatagctttttaaccccatcataataagatcctgtcgccagtgtcctcccacggcgggcaaggtattctgaaagtcctcgggcaatctgctcgtcattttttgcatagtgtcgaacgggcagatatgccttcgacttaggaatcttcgcaccccgttttagctcaaagtagtatagaataccgccggtgcgatgctccttttcactcagaggctgatcgtcaagatactccgcggggtttagatcaaaaaccgagcaccaaagctcccgtagagagtccagctcatcttgtgttttaggggcccttccacctaaacttaacatctcaattacacttttcaaggtcgtgaaaggtgatcgaacgtatattttcaatcgagactgggatgggtccaaacaatcgatggccacgatttcggcgactggtcgcaagttatccgggaatgagtcgagaaattcgttgaagatataaattgaatctagcaacccctttgcgggtgcagggagcttttgaaaagcgtctcgaatgacagaaatctttgtcttctcttcttctaaagctttccacccaggcaagtagtattgtttgacaacaatagacttttccagtagatcaaaggccatgaagctttgtgattgtggaggaagcgatttttgatgttcccttctggccggttcgtttcttgacagcagcaaactttggagatggcggtggagatataaatctaagtcattggtcaaacagagagcatctccaagtaggcgctgactggcggctgtattgataggatcgacttcctgcccagcagacgggccaattggttctaccgaatatcgaaccgtaggggttgctagcgatgtagaccagcaccagcttagctcgactggggtatgatcatccgtcatgaagctcttccagctgtcgggggggccacatcctttaggatgggaacccaatgatcgtgccactgactcccgaaagaattttgtgtgaagcgactcggagtccgaaggatagcccgccataaccaacatgctctggagcatggagccgacatcctctacccataacgatatgtcgtcggcggaatgcttgatggtgtcttcctcagttgtaccctgtcgggatagttaataacttgggccattttcttcacaaaggtacccacacaccttcacgtcttctagtgtccatttccacttaaaaggccaagccctgatataggtcagttctcttcacttcattgctgttgctagttaggacagtcactcacaagaagtttaatagagtgagagccataatattgctctaaagttaccgattttgaaaaggcttctattacccttgggacaacaatcaaaggtaacttatacacaatgaagattcagcaacttcatataatgtcttcggggtattatatcagggctagagatctctgggtggggcatagggtaagccggagtggctcggcgactaagtagcaagtatgtctatcttggtatgtagacctttccgagacggctgagtattcggcccttaagctgttacgaccagaagccctgaatagtgatccacatagtggcaattttgaatcatgtactgtacttcaatcctgtgaagatacacagaagtctttacgacgttgactagtaggaaaatggcgtcaagaatttccgatcggtgcaaaaagcgaaatgctaccatcatacctagtctcataggccagcatgatgctgttctcagcggggacacgactacaattgacctcagtacggcggaaaactgggcgaccaagacaaagttgctgcaaggcctcgaaggggtattcagtggcctgtccgagaatgtatgattgccaaatccccgcaaagtcaccatctttagcatactcacgcctgtcgtcaggatttggcctactcatctggcattggtggttgtcctactacgcgacaactcattgcagacttgattaatgaccgctttcaaccatcaatccccgttgaaaactctcatgtcgtcttagcggcagggggaagcttcgctttgacagcacttattgagcagatctgcgatcccggagatggaattctcattgcgacaccatactgggccggtctcgacatttccatcagtgttcacgcccatgccacagttgtgcccgtccatataccgttgatcgatttcttcagcacgaatagcatctcacattatgaatcggcgctggaaatatcttcaagtcctatcaaggcagtgctagtctgcaacccccacaacccgttgggtcagtgttacccacgggagactttagacgctttgctcgagttttgcaagcgctatgagctgcactatatttcagacgaagtatacgctctctccgcgcaccagccatttccgggcggcttccatccatttgtatcagcacttcaaaggggggatcgtgaaacgagggctcaggttcatgtcatatacagcctcagcaaagattttggctgcaatggaattcgcatcgtgagtggctctttggtgataccagcgaagcaagaatccatggacattactaaaaagacattaaatgcagggggcgttgattactcaattcaacgatgctgtgcgccttagtagcgctttaagcgttcacagtcaagtgtcctcgctgtcgacggtgctggcatcaaagacgatactgcagcccaccaacatcgacacagcaataagctatggggctcaaagtctgatggggtcctataaagtgattcaatccttcctggagaatgctggaatggagtatataccagtagcctttggtatgtttgtatttagtaggcttggcagagtcagcaacttcgatgcagagagaaagctgctgagatgtttgaagtccagaggcgtatctgtgtcatctgggtcaagttatcatttccaggagcctggttggttccgcatatgctatgcagttcccagtgatcagttggaagagggtctcaggagaattggtcttgggattcaggatttccatcagacattcaacgtggacgaacaatgactgcgccggcttagaatgaacttgaaaattgaagcactagaattacatgagttttctcttccacttaatctaaattatttaaatcggtgcgtttagtggtcctgcaaacagacaaggcagaaaataaatcagtctcacatctttcagagcttcctatgtaatgataaacgagttgaaaactattatacagctgacaaaatcttcatcatcgtctgcgcgatgatagcaacggtttccgaagaaaccatatcttccatatattcaaagtcgcacgtcgtatgttgtttctcttcggtgaactcaatcagaagtgggaactttgcacctgttgttttcaacactccagattccacctcgacgccagggagtgaaagattgtttgcgttggagtcctcctttctgttatacacaaccatcacttggaagatttcgtcttctccagcaatcttccgaatgtctttgagaggaattgagtgcatcagcgcattttgtatcgatgttcgcaccgtttttatcagactttcaaattcgttcaaactttcatcgacgcgcactggtaggcggtcaaggaagcagcccagaaggctttcggtgccaggctcagtgcgatcaacatgcggtatgccaacgatgacatctcgggtcccttgaacatttgcaatcgcttttgcaacgagagcgacatagacttccatagatccaaagaagcttggtgaggttctcagtacaatagactgtgagtttccggcataggttctcgaaccctgcccaagcgattcaaatggagggctgggtaaattcagtaggtggtctcgccagtatggagcatgtttggacagcggtggttggttatacttctgccattgagcccaaatggtgtaatctggagtctcatgtgcaggagaggtgacatctgtttgaggatcactttccagggaccggcgatactcttcctgtacctttttcagaagcaaatttatggatgccttgtcggtaactgcgtgatgttgcacaataacaagatcgacccacgaaatgttttagttaatcatgattctggtcaatggaccagatgaaagatcgaattttcgattggcgaagctgctgattgggggattggggatcttgtccacgatcatctcagaggaatcatgagattggccacgtacgatttgaccatcgacatctttgaaacagcttttgagaactggttcactggaaataactttctcgatggctttctggaagaattccaggtgaaggtctcctttcagtcgcagatgagaggccacattgaaagcttgaggtgtgggtgacgaggccgacaagtggaaagcctcttcctcgatgttggaggtagctgtatatggtggcttagctgtttgccaggatgaagagaaagaccgctgggtagacaactggtcttcatcagatatatgatcagttatctctttgcacaaggccgacagcacggtgttgaagataaagagccccatcggcagctttgtgttcagtattctactggcaatctgagcagcttttatctgggaaagggaattgcctcccagtgccaaaaactccgactcttcgccaatttcgacagtttcaggaaggccgattgcctcacgccaaacctgggctaccagagactgagtcggcgtcagtggatctgggctttgtcgtttttccagattcaaatgggactgcaatgccttgcggtcaagtttttggtttggcatcgttggtagaacagaaaatgccacgatggtcgaagggcaagcatatctgggaagcttcgttcggagggcctcgtgaagaccagggatattaatattatctggctcaacaaatgcaacaatgttatcgccactaacaagggccaccgcccggcgaatttctgcacagactgtgcgaatggcgttttcaacttcgctcaattcaacccggtagcctcttatcttgacctgattatcatatcgccccaaaaatttcggctccatatcctctgtccacacggcacagtccccagtgcgatacatgcggtgtccaggcacaaatggatccggaatgaagcgagtttgcgaaactgattgcatttcagctccgatgtaaccattagcaacttggatcccactcagacagatctcaccaggcacaccgatgggaactggctgatttcgcgaatcaagtaggtagactccaacgcgaggaatcgttcgccctaatgtgacttcttcatgtggactgagaagcttgaacaagcacccaatcgtgcactcgcatggcccatacgagttgtagacagctttagttcctgcccaacggtctgcaagaacttggggtaccgcttctccggcaaaaagaatggtgtcaatattcggatagtcagaaggttccaaaaccgagaggaaagacggtgtgatcatggtcgcgtcaacccgtgaaagatgggaaaatggatccactggatcggccaagacgagagtagctccatagcagagtgttccaaaaatctccgcctggttgacatcgaatccgggtgaaaacatttgtgagtgtcgtcgacctgggcgagcatccatgcgagcaggtccataagacaaatatgagaccactgcttgatgtgggatttgaacacccttgggaacgcctgtggatccggatgtgaatgtgatgtatgcaaaatcttctcccattgttactgtctcaagtcggggacacatagtcgggaccgtatcccccaggaggtgatgcaacaggatattgtgttggaaaatatcttgaaatttagcctgacagttttcgttgggaaagatgcacagtttcaccctagccgacttaaccatgatgcgcattcgctcaatgggtaattttgtatcaagtgggacataaatagccccggatttgatcacagcaatgacggaaatgagccattcaatgccacggtcgctgattatcccaacagcatctccaggacaaacgctggctgcaattgttttggcaacataatttcccaattgatcgagctcccgatatgtgatactgcgagatgtggattcaattgccactgtatctggccacttatcgacaccaatctcaaaactgtccttgagattagatggtcccacatacgggctcataaaagtggatgaattggtagtcagggaaagaagctcagttggctccaacatccttccgcacacctgggatattgtctgacaaagcggatcaagcaatgcgacgaaaatgtttcggaaatgtatgatcatgcgctggattaccggtctagtatacattgtctggttgtataaaccatggaacgtgagacggcctccttctcgacggatgaggacggttaatccaaattctggaacgtcggtacgggagaatttccaagtggagtcttcaaagcctggcaagttgtactctaggaaaagggcggtctggtacaccctggtgtgacttccgggcataatggtctgcaatgcttcttgtgcagaccactggtgagaaccaatgtcaagcagcagggtctgcacgctcgaaaggaagttctgtttgcttttgtgatccaagaggctcattgggaaggggcaagtattcagcgtcgggcccacaagggagtcaatcccgtggagagggaagtcgcggcctgagaacacagttccaaacgtgatctgctcttgtgctgtataagaccgtagtagaagtgcccaagcagcatgtatcattgcagccgatgtaacattctgagttcgacatatctgctcaacttggtctaattcaagctcaacgttgacagtagtaataccaaaacgttgctcttccattccctcattcggcttaggaaggctcaatggcacagcatcggcgaccttggaaaatgcttccttccaaaaagccacttccttatcctgtggaagctgagacctttgtgataagcttcgcgagaactgccagaattgagcaggtgtgttcttcagggttccaccctccagaagcgtttgaacttgttcgatgatgttactcatagaccagccatcaatcaaactatgatgaacaagccatagcaaatgtgcattgctcttgctctcgttcacaagaaggcgaaaagtgttaagaggacggaagacattactataatcgacatgtcccgtgcttttcatcagctcgtcggagtgattcaggagagctaatggtgcatcttcatcagtcacaaaatgtgtttcccagtcatgatgataagtagaaccaactttctgtttcccctcagtgagatcaaaagtcgttctgaatatggaatgctgctctagaactgctttccaggcattgcagaatatgtcactgtattccgtggtggaattccaaggaaaggcgatggtgaccagcatatagctcgccgctgaaaacttaatggaagatcgaatcattcccatctgtgttgtcgtaattggggacgtaacggaggaatcgctatggacggtgtcccacaagggcgccaatggttcctcttccggcgcatcagctttttccaggagctcagacaggaggaccagagaaatcggtgtgaataacccctgaaagtccactgtgtaacctcctttcctgagaatcgacaatagtttgatagcaaggagagagtttccaccaagttcccagaagctgcaagaagtacccactgagccagtagaatgccccaatgcttcggcaaccgcttcttgaagaatttccaaccgagtgccgctcgtggtgttagaggaaaatttggtagaaatgctctcaaaagtgtctcgcaaccttttcaaatcgactttgccgttggaggtgcgatctagctctcggagggcgatgatctgatcaggaacaacgaactcatcatgtgacagagagagttgcagtcgcatctccgtgccgtcaatgctttcaggcgtgacagctgccaccaatctacctttgtacatcagggcggctgccgactgtacctcggggtaggaagtcaagatgggcagaacttccatgtcgatgttaatgagataacctcggtttttcaccatgctatcctcacgtccacagaatatgataccctctggtactctgtgagctcgatcaagggtccggtacaatcgacggcctttccaggtaacaaatctctctgcagtcaatgcttcgtttttgtagtacccagatgccaagccgggtccactaatacagatctctccttcgtcagattcttcgagatgttcgtcaaggatgagcatttttgtttttttcatcggtgttcctagaacaatcggatttccaggtcgcaactcagccatactggtacaaatagtggtttcggttggcccgtagcagttgaagattcgccggttcggactccaccatctctcgatcaaggctgaacttggagattcgccgccgagaaagatattcttggcccgggaataggcttgaggatcccccaatgtaataaggagcgaaggcgttgccggaaggattgtgcaatgtttcgcgtcctccaaaaccctttctggttcagacaggactaaatgacctccatggcagaggcaactgaaaaatacaccccaagcagctgcacaatagagcttggattagcatatcgtgacagagattccctggatttctcggttccacttaccatcaaaagcgaaagagaacaaaagcagaattttgtcgtctcgaccaactcccaagttgaaaggcatgcctctgtcccatccttgcagaacatagttctcaacacatcgacgtggaataacaacacctttcgggctcccggttgtccccgaagtgaagataatataggctggatgttcagaatcaccgggagtgtcgagatctctggtgattgttggaatttcggtctcggtaaatgaggcattgtaagtcaagcgaatggtatctgcttcaatcaccgagtaacgcgcagaattgagtcctgtcttttcagacttgaccacaacttttggctcgacggtttgcagaactgcatcgactctctgttggctccaagagctggcatccataggcaccaggcaggcacccagtcgcatcaacgccaaaatcgatgccacgctctccaaagatcttgagagaaatattgggattgaatctcctgtccggattccatgagaatcaaagagcgcggctaggaataatgaggctttgtcgagctgttcgtaggtcaagcttcggtttccttgagagacagcaatcgagttcggctgaacatcagcatttgccttgattagagcacatatcgaccgaagccggtggtcttcccccgaagcggctggtgactcgggtgtagcgtgtggtgtcatatttgataggcgggtcgatttccagtagacttgcgttgagaaaggctggggtcttagttaaaccctctgtattctggactttgccaaaatattactttgccaacggcgactaagcttcggcggatatttttcccaattagccggccaaggttctccaactaccgcgcgtgagcctttcgttcttttgacaagactccggtttataacaccgttcaaaatctccggcatacagtctcttttcagttcctaaaattatgtatcgtctggcagaaacacatcgaaagtccaacttgtcattcactattctaagtaggcctctaattcgtgtttaaccaaacagcggtttctgtccctgagcctccgccgcaatcgctgtggagactcccattccagccagggagcccgaaaagatggcatggggaacatttttcatcagtccacagttgtcacctgccgcaaatacacccttgacggtggtttggtagaagggaggggctattttgatatcaccgctaggtgtcagctccaggccaagttgctctgcgaaagaaccgcggggttttgtatcgggagtgtgcgcaaggaatccctccgtcacgctacttccatcttcaaactcgagaagtatactcgccttctcggcttgtttggacaggctcttgattttgcgagaatcgaccttcatgacagttgaggtcccaaatccttcgctcactgctttagcgagatcctcagagccgtttgtgtagattgtcacgctttgactaagtgttgatacctgtcgggcgacgtgcagggccgaggggggcttggaaattccgccaatggcaagcacaccagcggaagtgcatcctcgctcttcgtagcctttacagaaaagacagtggaatctagtaggatgatcagtttaaatcggctcactatatctatgggtatgttggttgcatctcacattcccttgccccagcactcagcatagcccgggatatcggggaagacgtcctcgacaccgttgcacagaatgatcttttttccgttccacatgtttccagtctcatcggtcagagagaagcctcctgactcgtcctttcgcacgctagaaacggctttattcttgaactggacatggtcatagttcgagagaatattgttcctggctttctctcgatattccgagggtttaacatgatcaaatccaggaattaaatgcatatagtctgcggggtcatttcgataggttccagcatcgaaaacgattgaattctgttgttgacgagccagagtgagagccgcggtaaggcctgctgggccgctaccaatgatgagcgcgtctgctgaagttgccatttcggatattgagtttgacttggtgatcagaggaatttttcgtttggtgtacgatttttctgtcgagaatgtcagagagagctaacttcgtgctaccggcacatctatcaagtatggtccaagtggcaggattcggaggttaaaagccgacatagtgcccggcggacattaagttacgtaggatagccctcgatagctcccatttgtcaggttcatcgggcctatcgcatatgcgaggaatatctagcgcgcattgcacgtcaccaaggtccccgtaatctatccgaggtaggtaccttggacgacactgacatccaatcaagcatggcgtctctacttgggatttggattttctttgctgttcgctggtggtatatgctgctcacttctatagtatgaccgtgtcgagatttccgtcccgcccttagcgatattcatttgaacgcacctacttgccggtagtgtctagtttgtaatttttaatacgtggagttgtgtggttgaagaaccttggaatattattgacaggatttatcattctcatatatcgtatatgtgttctaaatgctaaagcaagcctttcaagattgcctgtctcacgttgtgctgtaattatctagcttcaggcttttggccccaaacgaaatacacattaagggcgacgtgatgttcgtccatctccttggcaaaccgctcgggcaaagtcttccattcttcttcagtcattccaatcatctcaggcctagatctcgttagatattgttttctttaaagcttccccagtgcgaacttacttggccaccgattggaagaatcccagaaccgacaacatgttgcgttttcctcgcgctccgagttcgggatcgggatttgaggagccagcaaccatttcaattgccttgtatcccacattcacgagtccttcgtcattcaatcgacccgcaagctttgttgaagcgagtgggtctgaaaccaccgtactggtcaatttatggaccgcctggacagccgggcatgactcgatgggcttggaaaccggagtctggaagtccatttcaacgagttgaatccaacctcccggtttcacgcagcctatcaggttgcgaagtacgagtggaacttcttcggttttaaacaacgggatgacgaatcgttggtggacgaggtcgaaactgtctttccactcggcaggaaactcttcaaccaggttttgcttcacaatctggaattgagagctgtccttgagaggcggatatccttcgggacttcgaggtaccgattgtgagcttatcttatgcaagatatcatgacacaaggttggacttgtaacttacgcgttgtcaaagccaacaaactctgcatctttggggaaaatagacttgacatcctgcatccaataacctagagagtattagcatcatcaattcaacatgcagaaactggtccgataccatctgctgtggcggcgtcgagaactcgtaaacccgaacggttcaagtcaattggtgccaggatcaatccattggcacctcctttcagccactcgtgctggttttgcatccgctcagcttcctccaagttccgtggaaggaaatatctgcttccgacttcttcgacattcttatcaacggcctgggcttggctggagtctgtcatgatgctttgagttttttggttgatatcaagtttcgacaatttgtgacaagtcaagaaaccttttagtatagggagtgtgctaagttatataaatatttcatccatatcttaatatacaccacctattcagggtgctgtgggtacagcctcttagagccattatcgtaacgttcaccaggggatttggagaggccggagagtaatcggacccaaaaaaaagcatcttgaattctccgatatccatcaccttggccaatgtgtacagtggcttccagggagcggagaatattaaaggggtgagagtacccttgaggccaggcccgtagataactaagtcaccgaagctgagtcatcgatatcccttcccgcaaggttcggagcgggggtggggaagccccacttcgatgaatactaaccaatcagaaaggttggtactgccaaggtgctcgttcagaaattgtttgcactgtatgcaccgtttgccctgtttgtatgacgtctccgtgattcatctgagaatttctttcacatggatccaagtcatccgtccaacttcaaccgtctgacttccacgcacacaaacaccaacgggagcactcttcaattcagggaagccatctgcttcaaccgaggaagttttccatgcggtacagaacgaaactccagccagtgcttacgtgcctcgattctcaagttgtggtggagtgaacccgattgtccaaggatataccctacttcttctagggctcctctctcatcgtcgccatctcatctcgctgcaagacacaagtgcttgtgatgctccctcttgaggataaacctatccaagtgattcaaaatttatattatcgaaaatatgcccgccaaatttcaaatgaagatcatggatgcgttcagagactaatgcatcagcgcgggtgtttgttcagatgatatgggaagggcttgctcgacgtgctcgactactactttctttccactatcgatatagagcctctgcttcctgtgatcggaccttcgctcattcgaggtcagctccgagagcttcctgcagcttccacggaagagaatatctcatccagagagagaaagcagaacaaagaataaccttgcagaattactattcctctacctcatatgtgttgcttgcgtattctacctactttgaattcatttctattgcctagtacggcacccaaaatgggcgaaagaaaattcatacaaattatctggagataatgcatgtcccctatggcagaagtttcatttttcatgccgatcaccaccatgcctgccatcaacctatctaggaatgcaatttttgtatatatcctgacgtgcgctgaagtctcgaatggtaacacccaaagtaggttgcttctattaacgatacggtatgctacttttctcaaggctacagctagtttcaattcatctctttttggtcaattcgcgaataaagatcttcgcccccaaggtcttcaactttaagaatgatccacaaggtcccccgaagactaaaagatacctttctaattttttacatttcctttcgtttcttaaattaacaacatcaagtgtggcttgaattttgatatgtctaaatctccagagtgcaagtcccgtcatgctatggatatagatgccaatgagggttgcgacaacaggtattcttaccacaatcgaagaacgtatgttccctcaccccagttggatcttgaatttcctcgctggatcatttatttaacgagtcaatagagcggattttcgagtcttacccctcctagtattggggtttgctagctatcagcttgacagaaccaacattgccagcgcactcacagggaattttgcatcattcatatccgtcaaccaaaacattattaatttcggaaatcaactgatgttcctgggtgttattatacttgagattccatcaaatattattctacacaaggtatgtcgcatcaatttccggatgattccgtctgattgagttgaattagattgggcctcgccaatggatcagtggacaggtctgcatcttcggcataatcgcatgtttgcaaatatttgtgcgcaataagttgggcttcctactcactagaacatttttgggtcttgccgaagctgggtatatccccggtgcaatgtatactctttccacctggtataccaaggaagaattgacaaaacgtatcgccatattcttctttggtatgtttggcggaaccgctatttctccgcttcttggggctgcttttttgaaactggacgggaaaggtggtctctttggctggcaatggatcttcctcggtacgattggggctggtccctcaaacgtcgaaatatgctaacaaatatgtagtcgagggtttattctccgttgcggtatcattcgttctatttttctttcttcctgaacacaagaaagtccctgtgtcgaccgatgaagtgaacatttcggagtctggaggacttcgcctaacggagaaaccattggcccatcctggcaaaacgcacatatcacttagcttggtttggaagacattgacaaactttcaaaaatggccgcattttattgccacgggctgtgtcttcgctacctggagccctctgacaacatataccccaagcattttcatggaactggggtttccccgagttagggcaaatgcattgtgtgcaatcggaagtttgctcactctccccgtgattttggtttttgcgtggatcagcgacaaatcgaataagaggggccttaccgtcatcgttgctatcttcgtgtacttgatcgcgttggtaattctaagaatcgcagttcaccatgtggataaatggggcaagttcggcctctggacaacagtcaatgccctggctgtgggctatcatccaattcacaattcttggatccaaatcaactgcaagagctctgaagaaaggaatataagtgttgcgtgagtaaaacctgtcctattgggcgttcttcggacagatcagctaacactccttcaacatatagaatgtgtaagactactacctctatatcagacaggctttttctttactaactcaatgaagtcgtcatgtcagctacagcggggctcatggcaggaacccagatatttcgggcggacgagtcagctatattgtaagtcctatacttgcggattataccccattcgtaccactaatgctaaatctattaaccttgtagttatccaagaggggtgtcaatcatgattggactactagttttgggactgattcttgtatccctacaaatctcgatattctggatcctaaacaggcgtatcaaagcaaaaactggcaacggggtcttgaacattctatagtggccaggatagcggtcttgtcgggtgacattctcacatatatgatcagatgcgatgtttaaaaatttacaattgactagtagttatgcagggataaatcgacttgaaccatctacgtacaagttctatattttggcttctaacctactcatggtttgggagtaattaggtttgtgcaggtaaacgacaacgtctcatattctataacgcaaaaggcatatgtttgatcctcgatatatacaaagaaaataaattatgcacaataatgcaacccagtactccagacctaacatgatatcgtgtcgtgcaaggccatcatgccaaatgcgaatccggaatccaaaagaaaagtcaaatattgcctttctgcttttcttttccaaaaaaaaaaaccttgaccctcatgcgttctctgcgtgtatggttccctctgacttccgaccgtaagggttctcatccgcaatccagtcctggtggcgttcgggaatctcgtagctgctgctcttccagggaacaaccttgttgacatacatccagtcaagctcctcaagtgtacggccctttccttcaataacgaagaaatagacgacgccgatagccacgaaaaggcaaccagcgaagacgtatccataggcaaagtcgatgtccttggtgatgaaagttgtgaaaaagctgatgaggaagttccacagccagttcgttgcagtagctaaggccatacccttggcacggtactttgaggggaagagctctgcgacaatcgcccaaaccatgggtccccaggtcatagcatatgccgcaatgaacaagcaagcgacgacaatcatacccttgccagcgttgggggtattggtaggtgtttccacatccagaacgaaatggccgatggatgagaagatcataaacatgataaacatccagatggctccgtagatcagggacttgcgacgaccgaaattttccacgacatataggccgccaaatgtagttccaaaattcacagcaccaaggatacactgggtcacgaagctgtccgagagaccagcgccttcgaagatagtggtaccctatcaaagaaatcggtgtcagcaattcctcgcaccaagatcccaaaatagaagaaaaggcttgtgtaggaacttacgtagtagaaaaagtagttagcaccgctgagctgctgcagtgactgcagaaccatgccaaggacaatacgatagaacatgcggggggcagtgaggaattcatcccacttctggccctcagactccgcttcaaactgctcacgaatctcgttcatttcttccaagatgcggacatggttctctgggatgccgtagagcttggccagggtgctttgggcactctcggcctttccgtggcgaaattcataacgtgggctttccgggaagaagatcataccgcctccgagaatcagagcgaagacgaaggtgataccgagagtgatacgccactgagcagtgccatccagagtgtgagtacccaggttgatgcagtaggccaagaaaatgccgagagtaacaaacagctggtagcaactgatcatggcaccccggatgtgacgaggtgcactttcaccctggtacatgggcacgagcagcgagcagccaccaacaccaagaccagtgacccagcggccaacaaccatctggtaccaatggccatcgggagaggtaatttgaacgatcaaaccgacgttgaggatcatacaccagagggtgatggaccacttccggcccaatttatcggcgacgggggctccgaccagggcaccgatcatggtaccgatggacaacaaggcgacaatgagaccggagcgcacggtgctgaatttataggaaccatcggcgccaagctcaccataccgctccaagtagttgctcatttcttggaagccagaaatctgacctgtgtcatatccaaacagcagaccacccatcgagacaaagagggccatcaccaaggaccgcatggttatccgagggattggggtatcgatacccacgggtcgcatgtgtttctccataggactattttgagaggacgactcgaggcttggctgttgagcctgtgtgatggactccccatggtgggggaacgattcggcacccatagtttaggttaggaaagaggaagtatgtatctgactgtcctgacgtgtgatatttcgagttgtatttaagagatacaatggactaggagaccagctcagaaggaatatgaagaagagtagaggaaaacaaacccatggggaagaagaaaactcggggaagatgggggaattgggggccttttgtaatccatcaatcaaagggtagagaagaaatttaaacccagagtcgaagtggggagagaattgtggagaggcaagttgcgcgagatgacgatgctcatggctaggtagtacttcatagtataaggtagggtggcagtcaacaatgcagcagcagacggctcgcacagccaccccaccaggggaggaagccatacagggcaggttccagtgattccaagtgggatagccgatgtggtcggcataggccggcaagtggcggattcaagcttataggccaaggccgtgccgaactaattcgggatcagatactttagtcggggccgagaaagagactgtacatcagttgctggatacggcgataaattttgaatctggagaaatcatccatggacagtggggcaaatagaaaacccggctaaccccaggccctcgggttctctccggatcgaagagaaattcatttcctaatcggtatgccggtgaaaacaggagaattatcatctccagacatgggggttaggggaaatgcggagtctggggatatgctacggagcaccaacctgagatattacgactacttcactagaataacattattccttgacaaatgccccatctcctccgtttaaaagcttataaataaagcctaatcccactatcaatcccaaacatcggcaaaataaacatcggcatcctcatgttgatatatcccgatgcgggggtccgtgggcgggtttacggggtcttacataatatcaagccccgcctgggcacacctttattgaattttcaattcatttccaattcaaatgctttctcgcacttttatttgtggcactattgattcttctaccgattgtcctctaactcataatatatgctacgggacaccatgcagtgacctctatcaactctaggactttgagaaatatgtgtgccccagttgtatacataagactgcgccttcccgatgccgacttccgaggtcgtcagtggcgggcatcggaggcgccacacccgttaccctaggtcttacgtcattgaagaattttcaattctttttttttatttgaccgtaattttcattgaattgataatctcgtacgtaatttacattaagctcataattttatgtaatttgcattaatttgaggatctgtttacggagtactccgtattccgtatgtattcctaacattacttcggggtacccaatatcgctttggcaacagcaatggcgtaaatctcgcctaaagcccaaacccataacgcatgccaatgcatccgcaacccaaattccggcatggcttttcctcatctcccaggtacggcggctcaaacgccttgaccaattgggacaagcgtggcaatttctccgcgtttgaattggtgcaggactttccccgcagttgcagttggtctatccagttctagataccccacatatgcaagtgggttggctcctagacgtcggtccctcgaaggctgaatcattggtatatcgcaagcagactaccgcctcgattattccgcggacgacacgggaggcttgcaccataagctcgatgggagcaatccgtggcctgatatatccttcagtcgatggaagaattttgatttcctaatccaaggtgggagttgatccccgtcttggacctcgatccccaagatatatatatgcattcattcattcaaagccagataacaagtgcactgcgaactctaggatcactatgaaaacactagcaatcttatcattgactagtctggtctctgccgaagctgctccctacgctcaatgtggtggaactggctattctggctccacaacatgtgtttctggctggacttgccaatatcagaatgactggtttagccaatgcctcgaatgtaagtgtgctcagatatgttccaatattgttcagtcgattgacacggaaaactccagattctggcagtggtaccaccactctatcggcaacgataagtacaactaagtcgacggctacaacaaaggtaaccgccaccagtactagtggggcggagttccccactataaatggactagaatttgaaattgatggaaagacaagctactttgccggttccaattcctactggattggcttcctcactaataatgacgatgtggatcttgtgttcgaccacatggatgaatctgggctccgaatcctccgagtttggggattcaacgatgtcaacactattccatcttcggggactgtttattatcaactactcaaagatggaactgccactatcaacaccggtgcagatggcctacagcgcctggataatgtggttacctccgccgaggcacggaatgtgaaactcgtcatcaattttatcaacaactggtcggattatggaggtatggcggcctatgccactgctttcggtagcagccagacaacctggtatacaaatactgcagctcaaacagcctaccgggcttacatcaaagctgttgtttcccggtatatcaattcgcctgccgtctttgcatgggagttggccaatgagccccgctgcaatggctgtaacacttcggttctttacaactggatccagtctaccagtgcctatatcaagtctctagactcgaagcatatggttgccattggcgatggtatctaggcccgtaatatctctcccatcatccattgtctaactcatattatagaaggcttcggactggacactgggtctgatggcagctatccctacagctacggcgagggtttgaactttacgatgaatctagggattgataccatcgactttgctacattccatctctaccccacaagctgtatgtatatccttttcccatgacccttggtccagagctaatgtattcgcacaagggggaaccactaacgattggggcaatggatggatcacatcccacggagccgcctgtgcagcagctggcaagccatgtctctttgaagagtacggtgctacttccaatcactgtagcattgaggcaccatggcagaagacagcgttgaacaccactggaattgcagctgatctctactggcagtatggagacacgctgagctcgggaaaatcggccgatgatggaaacaccttctactatggcactagtgactttacctgtctggtgacggaccacgtcgcagccattgactcctagatggagcacggaaagagatacaaatccatgtcatcagccggcaccgatatactgttctgccaatctatgaattgtatgctctttgtcaagatttttgattatgatatgcaactcagcagaaataacggttttgatgtggggtatttatacatatgtacatgcaactcggtgcttttctagaattaattagattgggctagtttcaagagggtataaagggcttgatgtcgctatcgaaagacattttcaatgactggattccttcttggtgacttcagagtaggctgaaggttcaggggaggtatcatcctgctccacagcgtcggtagggggcccgcggtagttgttatagccccagacaccataccagagggcagcgatagcaatgaagccagcgaacaccacagatgcatagttcatgctctccttggtgacagttgtaagcgttggcatgcagaaaagaggaattgcaagaagactccagcctatgatagttgaagcggttagttgaaatccatatataaacagatggttttgttaaagcaactcaccaagagcaatgacgttagcgatcaggccaaagactccaaagttgaagctaccgttcttaatatcctctcgaccacggaagatcagggagacggcgatcgggcaggcatagctcatggtcaagaaaatgacaccaacgcccgaaaaggcattgtacgcagcagtggagccaaagtagatcacaccgagaagaatttcaacgaccattcccaataataaagaattgaaaggaatgtcaagggtcttgttgacagtgctccaccattttgatccgggaatgccgccgtcgcgggcaaaggcccaagtacagcgagaggtagcggtaacacaaccgacaccacaaatgatgcccagcacaagcagaggaattaacaaacagaatgtaccagctgagttgccaatggcggccttgaagatggcgggggtgggctggcccgaagccagattgaccaggtatgtgagatcgggaagcacgaagcagacggggatcaagaagaggagaccggcgataaagttgataatgatggttccgaccatggcctttgggaccatgatggcgggctcatggacctcctcgcagagactaacagagaccatatatcagcatgtggaacagccgacttggagaattcaaaggtgccaagactcacgagataatcatgccggtcgccgatgtggcgtaggcagcctgcaagagaccaatgaagaacgaccatcccgcgggccacccagcttgactttcaaagtgaccaaaaacccatgcggcattgtgacgcccttgcttggcgacagccaacaggcagacgacaatggcgagtagaccggccatagtccagaaaatagcgaatgtctaaaaatgatgatcatcagtatgattaccccacggggcaaaggggcacgtgcgacacatacctccaaccacggcaaccatttgttgccaaacgccgagatggagtgtgtcaggaaggtaatggccaagaagatcaggaagatatgccaggcctggaaatcatcggtgattccgacgcccggtgatttttcaaagacatccagacaggccacgaggagcagggcagttccaaaattgacagcgagggtaatggtgatgtttcctgcaacgtaggaccagccacagatccacgacgcaacgcgacgacaccacaagggcgacaagacaaaggtttgatagtagacaccacctgcagtcgggtagaccgaagtgatttccgccaatgagatagccacgcagagaatcaagaaagagatgatcacccaaccccagatgacattggccggcccacctgcggcgagtgggtagtatagagtggtcgacaagccatagggcactgaagagagaatgaagcacataaaggtgacttgccaaatcgatcgattgcgagccatctcaggcttgtatcccatatcctccagggtgcgatccgcattggtggtgctcacaccctgttcgacggtcaccccggagggatgactgaatccatcggcagccatagagagaatgaagttattgcgataggtttcggatctgcatacggtgcagattggttacatataatcgggacagtattcgagaatgggaacaagagagaaataagaaatataaaaacaaaaaggcagcaaataaagaaaaaacgaaaaaaaagaaaagcgccactccaacggcaaaacatggaaaaaaaaacccaaaagaaataatatgaccggcatatttaatgcaaggcgaatgaaatccaccccgatccacattgacccacccggctccacccaatccccacccgcatccacaggacacgagcgcgattaactttgagccagtcaatgcgcgtggagggacagggagattgttggcacggccaatcagactgcttctataatccaaaacacgactagtgcggtccttgtttcgaagctttcaagaaggaacaccggggggttgtggtctccgagctgacaaagaccagacggagccctaactaagagtacatacatacctggggctaacgggctggatattctgtcaacatcccctgacctaccaaggtactactccgtagttgtctcacctctaactctatacaaatacggagtccttagtgtggaaccacccgttgacatgatgtcggaggcgctggaggtgccaacttctgccagagccgaaatggtaaggcaaatgagaacctcatgattttaaatattggatgttttcgtatctacaatataggcatcagaggcccagattcagatagcaaccagaatggacgcccgtaataccttctccgtatacagttaaaagatccccctgattctacctgcttcccgatatcagccgtgttcccacaggccatcccgcaagtatagagatagcctcaattaaaagggggcacaggctttcggcgcaaatctttcattggccacggctatcttggctgcaaatttttactcaattcttacggtgtactccgcaggggcaagaagtatggcaattttcaaaattcacaaatcagatggtaacttggaatgctgagagttcaccttctgaaaagtctaggcagaaatcaaagtgcgcgctttctaattcccttccaatgaaaaacaccacagatatggggccgagagaatgtctaacatcatacggggtacgcatatccatagtcgcaacaaacgggtggcactactccgtacagtagttagcgacattgtggatgcctaaggtgtcggacctcggagcttttcaatgctgatattatttccgcatcttcgtgggccttcataacgtgcataacattattcattccacgccttctgaccctgtgtgaagaattccattgaagtcaaccctctggcgcccattcaggtccatggcttgctgccaagcgtgtcatacaccccaaagtactctttccagtgtctcgtctacgtcaaccatcacaatcatacagaggcgacgtatgcaacttgcgagccgtcattattacggcttcccaggattgatgtgttggtcgtgtagtgtgcagagctacctcgactgatacagaccgtacaaagccatatcaaattctatcctgcggtcgctaatttataaaatgcccaggtttagagcacaacccaacttttcaacaattcgactcatttctgcatgcgctaggaatctcgccctaggtgatatggatcttttgctccagtgaaacagatggatgacgacgtcgaactactgggacggtcggatttgtgcgcttcgtgtcggtctcggggcaggtggagacgagtgtgtccatgcttatagccttggatgggcaatcaaatgcagacaataggccttttatacagactgggttgtaaatttcgaacaatagtagatccggactctaaatgtcgaaggtttcgtctcggtccgcggtgggggatgtggggatcttgacatgagggagaaaattgtgggggaagccggggcttgaatttatatacggagtacatggactctctttgcacgacatttaaaatctatcattggattgcgaggataaaagctcgcctgggaatgacaagatatagagcaatcccatctcgcgaagtaaaatacttaccccctataggctctgcatgtgattctccacgtagatcctgatagcgttaacttaaactatattttgtaaatgtatcattgtatagcgatatcgctatatagattcatgctatatcaaaatgacgtcggtttcctaattgagcgccggcgttgaaaaagtcctatctcaaagtcgttcctcctattgtattctatccagcctccaacatcgctttatcaacatttcccaatctcaccatgacaatgaataatatattttcctctattgccacttccaccaaccatctcaaggccaaatatcatggtcatatccaagctaacagattcaaactgctgatacaagagctccaagaagcagaacagaccaaggatcaactcgactggatatctgaacatcgccaggagacaagacgggctaacaatatcatccaacgggaaatgtatgtgggtgcgacatatcgccgctatgaagcccaagtgcaggttgaaaccccgccagaaccttccaccttgaaaaagcttcaggggtgcaatgtcgagctcatgctactgaatattgaatacttccaacacctagagcgaatggcagaactccttgagcgcaagccatcgggatgcctcgtccatcgacatacaaaaaatctgcggcacaaatccaaacagctctggaatatcgaacagatctactgccaacttcgtggcggctgctgcgctcgtgagtgtggttgctgtggacgatcttggcacaccattcgagagccttctggtaaggttcgatatatgcactgtacgggaagttgtggatgttgtacccgccatcgtggttactcttcttcaagtgtggtcaggaagaagtccggcatgtaagcttaacggtcgacaagccccaagggacttcgatttgtgaagggggattgctctcgcataatgcttgcataatttctgcgatatcttccaacataaaccttgaaaggtgccctggcctttgattcgtcaatcttaactttatctcctatttaactttgctcgtccttttctgatacgagattatttaattactctttatctggtctcttgcccggtctcttggcccagcttttttttcttttcttgtcggttattcgcggccaatagtatcgtggactggtcaccggaccgctggtgttgttacttagggcgccattttttgcccgtgttctattagggagttcgagagatcatttttccattctgccgttcacggatcccagcttttgctgtcctctaataatctcaaccatcgaggtctttccggttgattatgcaagtatgggcactaaccgtggaaaagaaaactcggggtataagctgcaataatgaatatgttgtacgcatttcgtatgattttgcagtcttatctccggctggaagtctagtggcttaccccaggattgtacctttgttcaggcctaacggccattaggcggccacggacccctctactgaccagtcattgtccagagatatagcgatttaatacggcgcggctgggggtctctgtacgacgggatggaaatgcgctgtggaaaagactcttaaatacggcatagattcctgtcgagcattttttatccagcattttccgctttcattgctgcacaagatggcaacaatagagggtgatcaacatccgatcagcgagaagggcaaatcacttcgaactttagtcgaagccgacctgctcgatgatcgttatgtaactacaaccaaacgtgggttgaagaatcgccatgttcagttaatggccctcggcggcacgatcggaacaggtaagtctgcagtgcgacatgaaaaaaaaaggattactcacataagtcaggacttttcgtgggttccggccaagccctggccattggaggccccgcatcgcttctgttgggttatctcttcatctcagccatggtttatggcttggtcacggctattgctgaggtaggtgcctatcttccggtacatggtggaacaatgagttatcatggattccgctatgtgtcgcggagtatgggtttcgctatgggatatctatactggtactctctcggaatcttggtgccgtacgagatcacagctgccggactggttattggatactgggaccagaatggatcaatcaatatcgcggtgtggatcacagtcatgatggtcgttattgtcgcgctcaactttatgcctgtgcgagtatacggcgagtcggagttctggttcgccggggtgaaaatcatcactctgatcggtttgttgatggtatctttcatcctcttctggggtggtggacccagtcgtcagcgactaggctttcattattggaataacccgcgtccattcaacgcctatctcgcaacgggagattcgggccggttcgtggcgttgttgaaatgcacagtatccagcgccattgcgttcattttcgccccagagctgattgtgatcagtgggggtgagatggagtcccctcgacgcaatataccccgggcagccaggagatacatttaccgattgatcttcttttacatctttggtgtactagccattggtgttatatgcccatccgatgctagtcgtttgaccaagagcgacggcacggtaagctcatcaccattcgtgatcggcatccagaacgccggcatccccgttttagaccacatcgtgaacgctgccgtcttgacatccgcctggtccgcaggaaattccttcctgtatatgtcttcgcggtcactctattccttggctatgtcaggcaacgcgccacatgtgttcaagacatgtaaccgatggggtgtcccgtactgggctgtttcggtttcggcatgcttctcagcattggcttatcttgccgttggcaactccagttcgattgtgttcaactggttcgtcaacttcaccaacacttctggtttcatctcatggatctgctgttccgtggtatttctccgtttccgcaaagctgtcaaagcacagggcattgaacagccgtacaaatcaaagatgcagccgtatggggtttattttggcctcgcgggtgccactctgatggcgctcataaatgggttcacagtgttcttcccatcggaatggtctgtgagcaactttttcaccgcatacattggtattcctgctttcctgattctttactttggacaccgggcactgtattggagtgatccatgggcatggcacccagaagaagtcgacatgcacacgggcttggatgaaattattgctgctgagcagccaccaaaaccacgggggccttggtggaagttttggtaacacataataggagctctaggggagagtatgtttgccaggtttgccaggtttgccatgtttgtactgtttgtcaatgtcatgacgtatcaactatccaagcgggtgtactgtggccactcatccgccttatcaccagacgaatatcccataacatccaatagcaattcataactcaacatctttttgctccgtaactcggagttggcccttatcaatatatttctgtacggaaaatagccagtgataccttctttattactcccatcgtcccacctattctctctcgtgttcggtatacgccgtcgaccgtctctctcccacaagttgcctttagtatcagcccaggactataaagactgccgtgtagaacatcatatgaaaattcgatttcgagtcgcgaacctgaaatcttaaagaatcagaactatggctgtgttaccacttaccgtccgtccgcttcagcctcctccgggctcaagcattgattttggtgctgaggttgaaggtgttgatttggaaaacttgactggtttgtggattactgccaattataagagcacaagctaatggtcatatagaagagcagtttgccactattcggaaagccctctacgagcaccaggttgtggtgttcaaaaaccagaaagggctatcacctaaagcccagtatgagctgaccaagcgattcgacccggtttccgaaaactatggacatggcaagaccattgatgcgaagcgaagcatcctccatcctgacctcaagactgtccctcaccagccacaggtgcaggtgatcggaaatggacatgttgattcgtacgagggtctcaaagatatcacattacgacaccctcaccaccgcacattccacaaagatcacatcccggacgataaggactatgattttacccggttttaccgctggcatatcgatgccgccctttacgacctatacccgccccaggtgacaacgcttatggccgtaagtgtgcccaaaggccgccgacagacattattgtatgatgatggaaccggggaaacaatggatgtaccacttgggacaacagcgtttgttagcggagagcggatgtttgaacttctttcgcccgaggataaggagtttgtgaagacaagcaaaattgaatatgccccccatccgtaagatcccttatggtattcccatggctctgatcaactgagctaaatatcacaacaggtacatttggatgagccaagcgcattcccgatctacggggctcggtctacactcagaaggactcgagttgcctgactcggaacttccacctatcgaccctagtaagatcatggttttcccaatgacctggaaaaacccagtgacgggcaaattggctctccagatccatccctctgctgtacggcgtatccactgcgccgatggaaccacgatcgatgacttggcccgtgtacgggacattgtctataagttgcagcggccggccatcagccctcagtatgtatatccccatgactgggaagataacgacttggttttattcaacaaccgtggcgtgctgcattccgtggttggtgcattcaaacccgacgaagtgcgactgttccgtcaatgtaacttggcggcttcggagccaccagttggggcatgagtgctttcatttcgatttcgatttgacatttctgctgttgtttgttaatattggattttcgagggaatcaatcgaacttaatctggcttgaattttttgaactgatataacttaaccgcgggaatcacatcttgagtaatgaaatattatatatcggatgttgtacataaaagacgccatttatgtatctgtaaaaagatctatgagcgtattgacaaggattagcggacaatgtaaaatccatgtacggcaatttggctctctctgagctcatcggtgacagagcgaaccccaacccggtgcaatggaacttgctctaccaacttctgtcctcggttgacgatactagtacaccccccgaccgtgcgatcaatccaattcgaattttgttgaaggtccggatgttccgctgcccacgcgggatgagccagagtatcatgtacaacagatgcgtcgtacacatcagcgagcagggccgcctcggcagctgccacttgcgcctcggcgagttctttgctcgtagttccagtgggtggtgggatttcagcgcgaaggtatcccaaaacacgaatctcgattttgcttgtttggagaggaacgtcctgaaggaggcgaatggcgaccacacgtttcgatatttgagccatatttactctcgtcgcctggaggggatccaatgcccgcacggacaagatagctgggtaccatccagtagtcgagcaacctttgctcgactcaaggtcgaatcgaacccagccgaagaagtaaccccttaactgctccgtcacccagtcgggcattctgattaagcttaacttcggcatattgtcatggttattggggtacgaggtttgatcgggttgacagcgagctttgaatgtcaaaggaaacggtgactgggggccggcatcgatagaaaccgggctgcttccagctatttctggcgctgctagatttacttgagatcgtccaataggacccttggagccattgatgataccacccacgcggttctcaacaccactcatcgtgtaagccttttgggccgctgtcattgtcacccacgatggacgaagcgcagcagcttgggcttgaagcggagcagtttgggcttgaatggctgagacggccggacctgccacggttcgcgctgcagtttgggcgtaaaggctcacaaccatagccccaacctccaagggtagcgtgctcaagctcgcgccacggatagagctaggggcagtggatgcagagagcacccggaacacggggctattgccaagcaccttcttcttgactccttggcagagaactagctggaaatatccatcgcctgcttcggctggaatccgtacaacggccgtctcgcgtagcttatgtgtatcgcgcggacgtggcggggccttctttcgaaatttcttgatgtcgcgttgccaagctcgttcatcatccggagtcacctggtcggccctcagcggcatacccggagtcacatccagccagctatctcggagattgaggaatgacttgaattgcattccggtcttcccggtccaacctttactctgcaaccacaaggtgtgttcgggaggtaaaggggcatcagagaaaattgatatagcgaccgatgtagtgggcccacggtagaagaccagtccatgggaatgtcgcaaaatggtgacatgcttgtttgattccgttggacgattgatcagaccagtgaggaaatacctagcttcgctgtatgccttctgaacaggcgtcggaggagccggagatgaggttggccccgctgtccttggtcgtggcagtgagcctggagttacaggcctggaaggtggcgtcccataaaggtccgtatatgatgggggctgtgatgatgggggtacaagggacggggtactagcagcataagctgtcgcctcccgctgatcggcatgggctgtagctcgcaagttcgggtttgacaggggcttccgcttgatgcgaaatgaatctggcggatggctcgggcttaaatgactagaagacattttctacatgatgttcaaggaattcaagaaattcaagaaatgccgggccctccgatttattggaatcatcactcttggccacttgcccccattggcccgagctggatattggcctgaggcatacattaatgcctgaggttgtaggccgttctcgagaatatgcgaaatatactgtaatcttattgcttttgacctcagctcgtactataaaactaggatgtattgaaggctaatggtatgcacctgcacatgccattgacctcctgcgttgggattgatctaggtgtgtagatacctcgaactagatccggactcgcggtatggcatgcatggatttagattgcttcaattatatgttttcagacatttgacctcttcaatttcaacactgtactatctttcagtatctcctactcccattcgtctctgtcattgatccgttcatctatcctccagcaactttgtagagtgctcaatctcattgtatgagaaacaaatattcatgactttcaccatttccacagctatcattgtcagtttggatccattccaaggctcttaaaactaacacacctgataatctatcaccggctgtatcatcctcatcccgtccatttatccgagtgtagtggaggacaaagttgacccgtggccgacggcccgcttggtacatttcaagtcgcgtggggacatcgtccggcgtactgccacaagggagcaaggtggcaatgctaactgcatcttcgattgccatagctgctccctggcccaagtctatcgagttgtcagtgtatgtcacacaaaacaagtttgtccatttgcagctattcggttgcttacatggctggaacggatgtgctgcatctcccagaagagcagcgtggcctcgagtccaagtcggcagttcctccatatcataaagatcccatactttgagatttttgtctgcacttgcaataatttgctgaacaccgggtgaaaacttcgaaaaggccctcacaattgtagtctggtctccagctgactgccaggctattaatcccaatttgtcagtaaccttctgtatcaacccccggaaacctcttactgtcactttggttgtctgcctgaacttcattcaaagggacaaaagcacaaagattgaggatcttgctatcagagcaagggtaagccacgagccgccggtcatgggatgcccactcaataaacacgccggtgtctcgcacaaaatcaacagtgctcgcatgttgctttaattgatctgtgggaagaagccaacggaagcatgacttgccaacggggtatggggagggagatcctggtgcgatactctggcgaatttgggactatagaacagttagaacagggacgagagctggataaacaccggtgttgataatctagtgttcatacatgtagtccatctgcaccaaggagcaggtcagccttgaaagtgcgaccatcaccgagagtgaccgacggacaagccccttccagattgacctcggttattctacaccctgtatgcaacgttgcggtttcaagggcacgttgtttgaggtggttgtgtagctcaactcgatgcacgaggtaccactcctgtgttcagattagatattgtcctggctgggtccgcttcattcgcctaccgcttgccaatgatgacgagtgtcagcaaactctctcttgtatgtcaactccccgtcaaatctatatcggtgtatctggagaaagcaaaaaatatcaattccagccactcttcttgtcaagagacaaatctgacctgatgaagcaatgtgcctccgaaatctgctggatcaatgcccatccagcgtagcaaagcagtgcaattcggcggcaaatggatcgcagccccagtttctttcaaaaaagcagacttttccagaatctaggcttggtgagaaattaattttgcagcaagcttgggttgttgcccggggcataccacaacacgatgcccctgttttccgagggcaatagctgttgagagaccagcaatgccggcgccgacgacgaggacgtcaagaggctgggctgataccgtcatgatgaggagcctatgtggtttttgagctatatcgactgatttcccttcatgaatctctgacgtgagatttatagcggtatgctctctcatccggtttccgagtttggcaatccccgatacttatctccgagtcagccaagagaagtggatgcttcaatgctgctagatggtccttgcaacctcggatagcacagcggtatttttgagctgaaacggaaggaagctatcgggcgcacagaaattgttgaatactgttgggtcgaagtgatcgacactgcattgttggacacattttccacgttcacctccccttcactccccttcaccatatccactccagtttgaattaatatggcgttgacacatgaaaacggtcctttgaattggagtcttataataccgtgtaatatccatatttccgataataactgttgtgccgctgtcatttcaggtagtgtgcgtggtagccaagacctttcacttcgttagccaatgagaatacaactgttgtgcatttcgcgtcagatctatccgggcaattggcgcgtcattaaatcaattgccctatggggagattgctagtcgtgaacaatataatattgcttaggctaattgtttatgggacgaggcagacagggcaggagggaagaagaaggtgaaacgtgttgatatgccaggagttcgtcatgtctacgagagcaagccctgtaggtatgtacgtgagaaaaatatatatatatatatatgattttagattgaatttcatatcctcattcagagctttcttggctgcccgttgcccacttggttggtgatgttgtagtcaccatagcaagcttcctggtacatggcctccttgttgaggtcgggaatagctctaaggaaatttttgaccttgcaaaatccattcacagagccatcacagaccttgagaccatcaagcggcagaggtgcattattcagcacaagtcggatatactcggtggtatcagacttggacgacaggtcagggttcttgtatttttgcacctgaagatccttgaatgcgaaatcattggggcaggtccaaacttcagagaacaagcgagcgccaaagggtgtcatctggtttaggttgaaggtgcggtgcggggcgtgcgcaaccgagacaggcaagccatgaggaccgtacttgaaataatccagacccaaagcagtcaggacagacacgatgatatcatcgtgggacatgtccatgtatagtggctgatcgagcgggaaagtcttgatgttgtcatcgtacgtgtagttgatgctgctgtcactgctcgtgatgagcctagactgcagacgcgctgccagctcctgaacatagccaatgccctgggcgcggccactgggggacccaaaaccgtagtcgccgtagaattgaagatcgatgtagtattcaaagtcgcgccactcctgctcagtgaagagcgcgcagaaagaggactggcccagtgccgcatactcgtacgggcacatattaagcatcgctagaatgtcgaaagtgtcgagcttcagatcctggggaaggtgtgcagcaagacgctctcgggcatgtttgacaagagacgaagcgaatacctgcgcagcgttgtcacccggctccatgccattcgggcaggaatcggtcgacgatagggtattgttgaagtcttcgagctcggggataatagtcagattgtactccgagtatgagctgttggctcctgtgtttccaaaaaagccacccagccaccagcgagcactctccaaaattcgggggtacgaggtcgtgcggaaagtcggctttgggcgcgcggtaccattgggatacacattcagtgatgcattccaggctgcattggcattttctgcgcgatagagcaatcggccatactgactccagaattgagcgccggaagtggcttcggtggcggcgccagtgggtagcagagtgttcaaaccaagcatatactcccaatcgttcaaaaaagacagaggtccggaaccgattttcttgtgtggatttttcttagtgtagttggccagtttctgggcaaagttctccatgccttctccatcgaggggccattgtgtaggataccgctgggcatggcggtgtagcacatgcacctgcgacagttcacactccgatggaaaccccttagagacattgaaactggatgcatcggcataggggctgaggttggcccagcttgttttcatatcaaaccctgacgggtatgagagaccggtgggactggctacggccgtggagctcgatgccactgcagcagtgcttaccgcaagagctagcagggccatggcagatgattgtagagccgccattttgatgctattgtcgtctctgggcacgcgacaaacttccaaaaacaattcgaggaatggccgacttacccatttttatctgcccctgtggagaggggaaaaggggatcgaccaaatctctttccttgcgtggaatcgcgtaagtccgttctgtccggcacgatgtgaccctagaatcctcataatgttgtattttgctcagggacaagataaacatccttgagttgcggtgatccccgaaatttcaatagccaagctcgcgtggggaaatgcttggcccgacgaagtccgtcaaaagccgtcaagggcaaaaaacaaaggagaaatacgagactttcaagggctgggggatgagccaacgggttgtggccattaaatgggcttttcttgcattcgtataaacccggtgatgcatcagaggcaatcaaagagaaggcaaaagaaggggggaacacatcacatctgggcacatgacctctcccagccctttaccaacacctccgctttgctgctataagaattcagctctcgggtcatgggctatacgatatcccgaaacccccattcgcttaccttgtaccaattgggatcaatgcagatgccatgtcgatgcagctgctcgtatcggacacgagaccacacttcttagagcctgcgcctcaactggatcggaagctccaaataaattgtttctgattacgagctctatcatgaacatgtgggagaaaccataaagcgcaagggatccggccctttcgagcagtttttttctttattttgatactcctaatgcagagacctccaaattagctatatcctagctattattgacttcactatgttggccctcggtattgtcttgtatgccctattgagtacgtccttggcctttgctatcgtcaagctagccctattggctttcattgctgccgtatattctggctagcatgctttgctgacctcgccagcctccttggtggtgctactattacaagctcctactacaataccgtcattgcctttggcgtgctactttggtaggttcctcggatagtctccagacaatacacacgcagtacaaagaaccgacctgacgcttacctcatatataggctgctatttattgccctagttatatttaccagtcttgccatgtgtggtgttttggtgtctgattgggctgggtaccagtctctcaggaaggagaagggagttggtatgaaccaaactagggctggccctgctcacgaagtgccgacgagtatgagtcctgtggttccatagaagttgtgttgtcgtgatgctaaaggtctttatgaacagccgaacagtcaatggcttagcccttcatcgccctcgcccacagcgtggaactgagtaccacacaggtccgcatgaaaccagtccagcataatcaccacagttttggtttggtaggattcgcaaggaatagtaatgggtctcatcggtaataggttatatcttttgcgtgtttccgacattctcatatcacctacactactaataatacgttatgccatgttaatatttgcttcaatgtgattatcaagagcatttatgttcatacaatccgcataaaaccgctgccgtgctgtcacgactaatcaaaggaggtatatagtccaatctatccgtctgaacaaactgtgcgtcgcaagccgtaagtgtccagtcgctgtaaaaagcataatcgtcaagcccgagaaaaggtgagaaggtaaaaagcaaacccaacatgtatgtccaggatataatgagccggctatcaagaaagacaagaccaggtacgagatggtactcaaccaaaaaaaagaaaagaagaatgataatggtaatgacgaaatcaaagagtggtctcttccacaggctcttttccaccgtgggtctcctcatggtcgtgcttgaacttcttctttttcttgtccttgtccttctcatccttgccctttttgctcatagcttcggccataagctgctcgaaggccatgtaatcgccttcttcctcggggtcgcgtgcggcctaaagctagctgttagcatgatactcaatatgcggaaaacaggtgtatatacctttgcgtatatattgccggcaattaccagcgcatgcgcacgctcaatccgtttctcaagtcgggtccgcttatcgcttagaatctgatcacaaacatcacgcaggacactctggatctcaaatttgctgccacgccacgccgctgcgaggatcttgccagtcactctcttctcgtattcagccttcttctcgtcagtccagtcttcaccaccgcgttcctccatcttagccatctcctccatggtcatctgcgcatcaatggctgtggagatggtggtccatgtctccttcgcaagagtgcccttgtccttcaagcgagagaagaagccagagatacctaggaacttctgtgacttgaggaaggaagtacccttctgaatgtatgtttgaccaacagcgtggagaatttccaaaccgaaagattccattttcaagttctccacctcaagtcggatcttctcctcgaaagcatgggacacgtccttacccttgtccgtctcagtccaaacgcttaaacgatcaatcagcttatttgcgagtgtgttgacacgatcttcgcgagcctttctgcgctcatcctcgaaagcgttaaggcgttcctgctgctccttagacaaaccctttttcttctccttcttgcgcagctccttctcctcctgagacagaccggctgcctccatgcgagcttcttcttcggatttgtccatgagggcttgctgtccgaaatttcgtcgaggagtgctggtaccagagccttggttggagactggtttttcagaggggccggcagctgcagctgcaggtgcggcctctgccgtagaaccgtgggtttcatgaacaggaacatgagcgggatcgccagctgcagccttcacctccgcgtcatgaatgttcagtttctcttcagcagattgagccagttcttcctcctccatttcctgcatcgtgatgtccatagtcgcggtgaggtccttcataagggagatctcgccgataagatcaacaaaggcctcgcccccgaagatcatactgaagaattcggacgggtcctctgtggaagacaaatcagaaacggtgtgctggacattggtatgcatgtgatggacttaccgaaaccaccaccaggtaccgactcctccttaccaaacttgtcatatcgctttcgaagatcttcgttgctcagaacttggtacgcctcaccgatctaaattaggaagatatcagttccgcgtaacatgcatcatccctaggcttgcgcaatcataccgcctggaagcgttcgtgtgcggtttcatctccagggttcttgtctgcgataatggattagaaagcctagcaaggaaatacaaggtcacatgcggccatacccgggtgagtgacaatagccagcttccggtaggcctttttgatttccagttcggtggccgtcggtggcacacctagggcgtcgtagtaagcagtatcggcaaccatcgcagcgaccgagcctaacttgagaacagattgaattgatggaaaatgaaagctcaatagattcaaagatctgaaggaaaaaaaaaacagtggaggggtgttgtttaggcagaacctcgagatatttttcggaagttggcgctgatatcatgtggggttgtatgcatggtttgctccggtcacgtgtcggctaaactctgcatttaatctgttctggccttttccccttttcctccccccaatccgccgttcccccaggttctgttgtttttgtttgtttgtttttattaatcctcgtcttcaatacctttgctttcggatcctattccaattgcttcacttggtgaagattcagctactttgcaacaactcttgaacatccgactcgcgcgcctctcccccgcccatcatgggtctcatcggcaatgctctctactactccttccaccccatgcagctgaggtcaattctccaatggtatgtttaggtgttcctgaagctcattcccacatgcgaagctaacgatccacgtcacataggaaagtctggcacaacccgccccatgagcgtaacgagaagaacgagaccgagaatcagaagatctgtttccagtttttggacaaaaccagccgcagcttcagcgccgtgatcaaggagttacatcccgaattgttaatccctatctgcatcttctacttggtcctccgtggactggataccatcgaggatgacacttccattccattggccaccaaggaacctcttctccgggactttaaggacatcttgacgcaagatggctggacttttactgggaatcggccggaggagaaggaccgtgagctgctggttcagttcaaccacgtcgtcaccgagttcatgaacatgaagcctgaataccaggttatcatcaaggacatcactgagaagatgggtaatggcatggctgactatgctgtgaaggcagagcatgacgatgctagtgtgaagactaaggaggagtatgatctatactgctactacgtcgctggattggttggcgagggcctcactcgcctcttcgtcgaggccgggtttggtaacccggctctgttgaagcgacctaagttacataagtcaatgggtcttttcctccagaagactaatatcatccgcgatatccgagaggatttcgatgataaccgacgtttctggcctcaggaaatttggtccaagcatgtcgacaactttgaagatctcttcaagccagagcaccttgatgcagctcttaactgcagctcggagatggtcctgaacgcgttggagcatgctgaggagtgcctgttctacttggccggtatgcgagagcagagtgttttcaacttctgtgcaatcccgcagtctatggccatcgccacaatggagttgtgtttccgcaaccccgatatcttccagcgcaacattaaaatcaccaagggagacgcatgtgaactcatgcataagtcaacccaaaacttgtcggttctatgcgacaccttccgccaatatacgcgcaagattcacaagaagaataccccccgggatcccaacttcctgaagatcagcattgtctgcggacagattgagaagttcattgagaccatcttcccgacgcaatccgccgaggccgctaaccgtaaggtctctggtgagctcactgcggccgagctacagaagaagaaggaagacgacgagaacaagagtgatgtctacttcatgatggctctcatgggagtcattgttgtcgttatcgctagtctcatgatcttcgccgcctggatgatgggcgcccggttcgaccttgcctttaaggagatcacgtctggccacttcaggccgccggctaagaaccagcttgaacacccggagctttgattgtcttatattattttcacatccacggcgttacgaccttttactgtctaatattttcgattcccccttcggcatattgtcttactattttctcgcctgcccccggcgccctcgatgtgtattgataataacataactctttcttttctttgcctcgcgcacacacagactaaccctcccatttctaccccaccctttttagcacggatgtcaaattgcgatctggccttttcatggccgaggttgtgccgaagaagtacttatatcgaaatggagattcatctccctagccagtgagtactagatctttgtccaacggttcgcccgaggtggcaaacatccattgaagatctagaatatcccgtgtatgtaaagttgtatgtctataggaaatgaaaccatcagcctctggaggttgactcttgtcctgaactcagataactgaaaaccggcgggactagagaacaggcccccaatcagaagtttctgctatagtgtatatcttttatttctcggcaataaatttcttccaactgccggcccatttcttttcgctttctcgctcattactcttgccatctatccatcggccaggttggcctccccgaagcatcctcaatcaaatgggttccaaaaggatggcttcttcttctggggactccggcgactccccattgtccgcgagtgatttccggacttataatcgtatgtcggagcaaatggaaggatttgtaagcttaccatcacacctgggcacctgggcacattagtataccttgagcactaactctcatgcagcatagtcatttccgtttgacatggaaccagctttaggaggcctgtgaaaactctagaaaacgggggctttcagcccgccagatgattatgatgggccttcaattctgttcgcaattggatttccatcattccatcgaagagcaacacatcttccccgtattggcgaaaaagatgcctgagtttctaatggcgtatctgactacgttgtacctgaaaagggaaaacaactagtgtagattcgctaagatctaaatggacgagggagagggagagaggaagagggagtggaactatctgatgatctgaacccacatgggtgaccgccttccggtcacccaacagtttcgaaaggagcttgagctattgagtcagcatagacagatccatgcaggactcgagaaactcgagaagtatcttgagcagtgtcggtccggcgaggaagatatgcgtcgcgaagaggtgaaacggttgatggaagggtttggcaaggttctgtggacacacttggaccaagaggttcaaactcttggagctgctaatatgcgcaagttctggtctcttgctgaaatgcgccagcttcctatgtgataataacgaacggaggcaagttttgtcaatttcattttcagaaacatgtccaactttttttgaagagtatacatatctgtgtgcccatttgaattaattcgaactattctggtttgctatttggtcttgaaaaagcacctatgttttgtttccgagggatctgcttctgcttcatcaatgtccatcacaagccagagttgcagtttgataatggtaacccctacacgaaaatccttggcttagagtcgagtgaccactgctaacaatgtggactgttcccggaagctccaccacagcgtacttgggaatgtgaacacgttgtcatcccttgcctggtatgtatactaaccgcatccaggtagcattgcaagcacgcccccaacttctgctgtttcaaaaacccttgacactcgacccagtttgtgtatgtttctttcttctgttggcgatgatgtcgtgcgaaacaagcactctcagttttaccgattcatcggtagatgtagcgagaatgccagggtcatatggaacccataaatacggagcagccgcaaagcttcggaatatcgacactacatataataaaatatacattgttaaccttcaatgacatgtgcgtcacttcaagttgatcaatctcgtggcagatatcggggccgccgatcttcatctgatccgtcagcgctcggctgtcagatgtttctgtctccaagaatgtgctctcacagaagtgcacaagctcggccgagctgctcattttcactaggtctcacatcatgacgataacggaaaggaaatcttggcttggatcatgaacaatcggcgggaaacagagaagatcaacacatccgcagcaaatgcaggtcatgaacctattaatcgacgtggctgagatccccagaaataacctgacctttttcactctccatatctccactccagtgggtccataattgtatctcatcttgtgtctggggtcatcagtactacaccacgcgctcctttcctcatgcggattgggcatgatgtcgtgccgcatgcaacttatatgaaatacaggatataagtaccatcggaccaagctcgagaaatattaggttagtcaggttatagcttcgcccttgctatctataccgtgtcaaaatccgctcaactcactgccgtttccaccaacatgaagttcacaaccaccacgatcctaaccaccgctatactagcaggcagctctctcgcagcccctcgcagcggcctggttgaccgcttgcagacccgtggtgctctgtcacgccagtcactacctgccgaaaagaagggtgtattactgagggaaggaaccgagggagtcaatgttcaatacagcaagaactgggctggggtggtgcgcgagaagccacccgccagtgctacctacaccgctgtgtctgcaactttcaccgtccccgagccaacggccaccgatggctctggggatatgcaggctgtgtccgcctgggtcggtattgatggggacacttacaccaaggccattctacagactggcattgatgcctacatccagaatggcaagaagacatttgacgcctggtacgagtggtatccattaagtgcggagaactttgaccttgcattatccgcaggcgacgttatcgttgcgaaggtcgagacagattcgcccagcaagggtgtcgctatcatcgagaataagtcaagcggccagagtgttaccaagactctgtctgcaccttcaacctccgccactctcgctggccagaatgccgaatggatagtcgaggacttcaacactggtaacagcatggttccattggtcaacttcggcagaatcgattttaccggcgcccaagctgaggctggcggtacgaagtatggtgtcaaaaatactgctgttttggatatccagcagaatggcaacgtgaaggcccacgtggaagtccgaagtgacactgagttctctgttacctaccagtgatttgatatatatatcggagttgatgagtctggcgttttgtacaatggatgatatccgtcatatatctctcaatcgagataaggaggaatttgcatcagcaaagtgaggtatacttctttcattcaatttagtgaaatctatcaaaagaaaacaatgattgatcacgtcatttatttcttcctgtgataattggtcaaaatatccctgcccggatcctgatgaccctttattatcttttctttataaaccgcgtattcagacatgttgggcctataattagatgaagagtgcgcagaagatgttacgaagaggaaagataatagacttcttactaactattcaggaaccttagaaatacacatagcatcacaaagaaaaggacatattttggatgttgaacaagaaattcgctgggatgacagaaacgacgacggggtattctgctgaatgataagaggaaaggacaacaatcagatcgaaacgctcagaaaagataaaggcaaactgtgagcctagtaagggctcgaggtgtcggcaagaaggctgtacgagtttaattgaatacccagagggcgaggttgaggcatcaaggcgcctagcatctgctggtcatcgtactcattgcctgttccatctgtaagcgcgaagaacatggcagatggtcggttcacgcgcaaagcttccaggatgtcgtcactccacagccctgtgcactcgttattgacaagttcgaaatacggattcagaggcggaaagcttgagtcgaggttgatgaaacggatgcgcaaatactccagggcagggaggacggataggcactcgattgccttgaccaccattgcctcaaaatcacgaatgaacgcaatgctggtaattggacgtgtcccgtagctcgtctgcgtccagtgattcaatccgtctaccttctgattgtgacagcacgtcttgactgaaagatctagtgacctgagaggagaaccagactccatttccgttgccccttccttcaatttcttgaagaggtaccaacatacacgaccagagtaggtaaatgactcgaagcgcggaattgcctcgccaagtagagtacagatcggaggaggcgcgctttgagagcggaaaagcgcagacagcaacctattactggcgttggaaaattcctccaggccaagattgatgtgtcggatggtaggtggagtatcgataaagatgctcatcatgatcaagtaggcacacagatggggttggacccaatcacaatgccattcactcaaagctggcaacgcttgtgaaatgttgccccagtcgtcaacttgtcgcatcaggttccaggcaccacgcatgatgagtgtctgtatttgtccaagaacaggtagattccgaccgttcatggcttccctatagcgggaatgccgcactataggcgcattcttgcagtggccaccctccagggtgagaacccgggcagtggggaaaaggtactgaataagccagaagatttcctccagcgaagtgttaccggttgcacggtgataacgaaaaataacatctccgtggttatgatcatgattcgtctgcatatctacaacatgttctgttgcatgggtgccattttgctctgcatttgagcgagcatcgttagggcgaacggcccgatttccccagataggcatccaaatctcaatgtgacagacatatggagccaaatgggggtttcgcttgaaccaccatacacacttgatcaattcgcggttggtgcctttgattttgactagataaaggctactcattagtacaattgcgttgaacttcagattgacagtcagataaaactcactatggcggtagattcgactttgaacaagtccagtccacatccggcaagtcagggccaggtcggaaagggccttccgccgcggatggtggagagccttactccagttctgagcagaagattgaccatgtgctgaatggttactaagggaggctcttttgccaaagatttgatccagaatgacctcatggatctcaactgggagctctgtgaattggattgccgactgtcctgccaggggatgagattggtcctcactggcggcgatatgggaggtaagggtttggtagtcatcctgaccaataatatttgcactgatgctgcagtttggtttctctgcgctttcaggaactgcaacaggtgcactggctaggggactgaccgaccccggccggagagaaattgcggagatcatgagggggggtagagatgaggatgaaagaggattggaagagtcagaggccattgatgcgacctggtcttctttagatcagaggctgcagcctgatagctgcaatttgatatgtgttagtgaacaaacgagccatgccggggatatgcatatagatcgtactcacctcacagctgtggttaaccgctatcaaagccgctccggctcaattcagtttaggtacagacgggttatctcagaggatcctgttcacaaatgaatgaaataaacgtcagaaagagagagggtcgctggccgatcaggctgttgggcagcttgatgaggaggattggaaggggattggcggggaagagataggcccggctgaaagtgaagagacgtgaagatgaaagaagaccgagaacacagtgaaggagaaaagaaaagcaaaatacatagtcagaggaaaaaagtgacgggggagtcagaataaacgcgggagacgttgcgcgacacgaagttctacggttggaatacttgatatcggggcttttgagaaccaagacaagggttgtgatcaataaaataacacgaacataatcaaaatagatcgaagcctgcattatacatgtatttattgggtaacaactatatcatgtcgtagatggtgtacatgggccgtgatagttcccttggccctatagatgccgtcgttttcgcaataagaaacatgacaggaataacagtcattgcgattgaaatcggacattatttccttgcagacatacataacacagatcagcaaatggatgcgagggtatcgatgcagagtagacgctacaaaaccattgcaaagtgagaaagaaaaaaagatggaagctagcgcttacgcctgaaacggaaacgaagttcatcatcgctgtccgaatcgcgctcctcgcgagccctcttcgggggccgagccggagttgggtccgaggtcggttgaagcgaggtgcgtgtaatcgctgacagcttggaccgtgatggagcaacttcatcgtgatgatcagattcaggacctccagcctcgttctgagggtcagtctcagcaggattgccaccccaatagtgatcgccaattccatagtctttgcgggtcacttcttctaaggggacgatcactgtctggatgcgagctcgactacgcggctcgccttttcgccggaacttcttgaaattcttgcgcccattccattgatcatcccatctgtccgagctgtcatgctcgtgcgctggtgcgttccggacgggaatctccatttcttccacaatagccaggttcttcaatttgtccacatccacatcacctacatcggctgaatgtgagtcttcttcggccttgcgttgttgttcttcttcttcacggtgctttcgcgcggcttcgagcacgtcaagtttaggtcgcttgcgtttcggggcctccgattcgggggctacggcctcatcctctgggtgatggcgagtcatatctgcacgacgacgcttcattgcacgggcgcccgggagaagatcagccaccatgtcctcctcagcctcttcctttactatattcaggggctggatttcttgagatggcgcttgagtttcgatatcgatggtttgagtggagttgatattggtgtcctcttcttcaggtgcatacactgggacagattccatgtcgaatccgtcatcgaaggttttcattttactgacgtatgcacgcacacgggtcttggccggagctttcgagggctgactaggctcagagttaggcagatctaccgattcaggtacggcagaaactgcttgttggcttgtttgttcagcctcgaccgcgggtgtagatgcggtgatctgactagagctctcctccgtgggcaaggtacggcagaggggtgatgcatcatttccaaggatagcgtcaaggaactctcgttgctctatcacgcgctggtccatcattagagcaacctcattaccgacgtcaatagaccattgttcgaggtctcctttcgatcgaaagcgaacaagaacgacgccaccggaaccgtgtcgctcggggcccacgcctttctgtcctgctgccttttttataaaccgaacaatatctgcggcagttgtgaccccatcttcaatttcgtagagaagcgccttcccttggccattgttgattggaccttgtaggttttcaaactggcttggatcaccgaaaataaacgtatatccctcaaagacattaatacgtgcgggattgggagcgaaagcagcggcgggacgctgggttggttctttcccggggggcggaaggtgttgatttggatcgggccatgctaattcgaagtcggtttcaagtggacatagcgactcaatgttctcaagatccccgggggtagccgcgtagacgagtgcatcgatatatgaatcatctactatgtacttcccgttgacgagtgcctgaagacccttagctgtattccgtttgcgctgtaccacatgtgttgtgtgatcgacaatataatccatgatggtcttaatgtcgaggtcttctagacgtgagcgaacatgggctagaggatcttcacctcgcacctgcttggaggaggatgacaaggtcagaaccacgggctcccatttgatcctatcaagagcatcagccgggattcaagccaatcgtaagaagacatacgcaccggagcgcatgctggtatttagcgagctggatgagatgctcatcgctcttctccaacttgcattctccttggattctcctctcgtcaacgactgttcctttcttcgagtctaaatcggttatggtgatattggatcgcgctcgtagtgacaactggaggggtattagccagataatgcatatcgtcgcggggagttcaaccgtaccccatctcgcggactgaccggtgagatttcaatggtcatatgcttgcgggatatcgaattatgattgacagcatggcggactattcaataagagatcagccgaactgtgtgatgctccaactgaagtaggccatacctccgtctcgatggaatcgaccgaatagatacctctttccagggcgcagccacacgcgcttccctatgaggctttagcaaccaatcgatccttgtcaatcaaatattcccaccttccagaaaatcaccggtcgaatcaagaatccacatgacgacgaatccgcccagagagatgtttagcgttaggcaacatggctgaggctcacgcaaattggaacgcgtgtccacgtgactccgcgtcaaattgaattccgcgctctcgccttctcatgatcatctaccagccatcgatgggacggtggaaagtatggagtcttcaggtgagaaccccgccagtgatccgaagcctgagtcggtccctgatgaggattttgggaccctgaaatatcagctactcggtccctctttaactaaagcgggccaagattccgtcgatcagcaaaaggtgcgcttgatgattgtattcattttgagctttagctaaactcgcgtttccaggtatcagaaattatatacaatgcctccaggggctctaagttctttaagcacgaacaggatcgggatcggaatttaacgttgaaaatcgagcgaattctaaaagaaaaggcacggctagaacgtctagacttgagcagtgagctacgacgtgccgatgaatacctcgcggagcttgaatcgagccgtgagctctctcaacatgtcattcacgtggattgtgacgcgttctttgccgccgtcgaggagcttgaccggcccgaattcaagacagtgcctatggcagtcggtaaaggagtgctgacaacctgtaattatctggcgaggaagtttggcgtcagaagtggtatggcctcatttgtcgcgaaaaagctctgcccgcagctggttcttttgccgccgaactacgacaaatataccgcaaaggccaaggaagtccgagctatcatggccgagtatgaccctctcttcgagagtgcgagtatagacgaagcctatttgaatatcacagcatactgcgacgaaaatcacttggagcctgatgaggttgttcaacggatgcgcgcagagatattggaaacaaccaaggtgtctgtttccgccggaattgctgctaatgcgaagattgcaaagattgcatccaacctcaacaagcccaatggacaatttcaagtccccaatgaacgggaggcaattatgaaattcatgcgtgacctgtcggtccgcaaagtgaatggaattggccgagtatttgagcgagagctggaatcaataggcgtcaaaaagtgtggtgatatctacccacatcgtgctttattgaccaagctatttggggagaaggctttccaattcctggctcagtgctacctcggtcttgggcggaccaaaattgaacctgtcgagacccacgaacgtaaaagcgtcagtacagagaccactttccatgaaattggagacaaggaggaacttcgagcgaagctctggtgggctgcgcaggagcttgaaaaggatatggcccggactcatttcaaaggccgcacgcttgccctgaaagtcaaactgcatactttcgaagtgctgacgcgccagacagctccatctcgtgccgtcttcctggcaaaagatttgtactcctttgctttgcccatgctcgccaagcttgagaaggatattccgaacataaagctacggcttctcggccttcgctgctcgaatctggtcagcactcagaaagttggaatcaactttttcggcgtagcaacacaaccaaaacccgccaccgagccaacttctgagcccgcccctatatcgacatcggatgtcaatgtatatcatgagatttgtgccgaggaggctttcgaggcggcggctcgccaggaaatacaggacgagatgaatgatctagagcagctgagtcaagagacacccgatgttcatgagccagaggcctctgcagccccaccggtggttgaaacacccgcgatgtgggattgtcctgtatgtacacgaccgcagattgcggatgaccgcgcattcaacgagcatgtggacttctgtctctctagacagacaatccgcgaagtcgtgcaggacacatcagaagaaacatcctcaataccccccaattccagaaaaaggaagttgccatcacaggctggtattcccgaaatggatccaaaacagaagcggctttttttccaatgacggcgaaacttggatgccgctcatcccgacagaaaagcgccgatactcaggctcggaatccagcaatcatttaatattgcagggtcaccgtttttcaaggctccacttgacagccgccagattcgggatagatgtgggacgtctaggggcgagacggatacagggggttcttttttctatgggtgtgttggcaatgacctgccaatcaagggccttgtagaacccattctcacaaaacaatagaggtctcacaatttcctcatcgcaatgtcaatagttcgacgcccttgttcattgaagtaaggaattccacgttgcggtgaagcggcgccctaaacccaatcaggtgacattgttttcgtcactcgactttctcctcgactttctcgactttcccatccatcaggccacaaattccctgttacggaacaagaagacaggcgattctttttattggccggtgccacaatgctcatgtcctgtggcacctcgcaatgccatgacttgcaccccccgcaactatgacctacgataaacaaaacaatggcagtatcgccaaaccgttcacacccaccctcagcgctgcattccataggagtaacagggctcctttgacaccaaaacttgcaagtccaagtcccggtccaggattcccacgtcgcctcgcacaacccgaccacccctattccaaagacgactcccccgcggtcccgacctttctgagcgccaacgtcactccacgatccggtcctcgaaccacccggcgagatggcgctatctactcccccacaaatacttcacctgccccttctccctctccaaatccaccttactcccagtcaacaattggttatggtcgtcgagaccgcagcccggcccgcggggtcaagccggaacaatctcgaactctgaggtcgaagacattgaccgcagacaaccagcctagatcaagattgaattctttctcggatacgacatccgggacccccctgttcttccatgcgtccgacgcacgatcgtcacatccttctgagccatcagatgcccctcgcccgaggccccaggggaagacatccccagcctcgagcttcatatatgcgaacggagatcaagagcgaaaatcactaggggagcaatcgaatgttacatccgcttctgccaaacggcgatcgggtggtcttccccgtcccctgtccgccagcaaaccaccaccttcctcctcgcgcttgagctctcctggtcttccagatgtagcttcacaccctccagaagatatcagattaccatatgtcaccagcattgagagtggactaggaattagcccgcgtcttggctcgccctcgtcgagtacaatcggcgagagaccgcgaccgcatccgatccgacataccaagtcctcaagcgtcgactcaggccgccatggcaattatttacaagacagcttgcgggcaagcccagtcatcgtatccgggagccattttggtgaagaaccagcgcctgtgatgtcggagcagatacccgcccttcgccctcgcatcttcagcaatgtatccaccacctcaacagatacataccctcctgtaccacttagtcctgggaaatccgagggtccgagtgaggcagctcttaatgcgcgtatcgagcgcaagatcatggacttggaaataagcaactcttcactactagccatcaatcgtaccctggagcgcgaaatgcgacaacagaaggcggagcttcggcggttccgacgactgagtcgctccggacgcatatcaatggcaccttccacccgttcattctccggagcggcactctcagttaccagtgagctaaacgagggcgcaagtgagatttcgaacctgtcacaagacgatatgtccgacatcagcgatgaggattcaattgtggatgagagcatcctgagtccgggctcgctggccgagcataatgccaagaaccgtgtcaatgatgagaaacgcgtcatgcttgacttggcgcgacatcaggaggtgctagtggacagccagaagatgaaccaaagtctcaagcgctgtctaggatggaccgaagaacttatcaaagaaggacagcgggccctggagtacaatgttcacgttcaagacgttgagctgggtggccgagtcctagcgcctgaagagttgggcgaaattggtgagagcggccgtggtcttttgagcccttcagtccaatataacgcctctttttctcctatggaggcctccgaactatcatttactgaatcactatatattggaacactatctcctacgccctctatttctgatccgagcacctgatcttatttttggcccttgtctcccggcgggacgattcaattgttttctttcttcctcatacatttgcacaataccctttcttttttgatgcgtttcattttgaattcgtcctttcttcgatcgagacagatattatctcactgttttggacttagcgacttgtactatgagactctggacttacctttcttcccttgcgttcacgatttccatcagacaggatggtcaatgatagacctctatacccgatcatttcatccatcgcgaacacattttttggctatttcgaaagatacccgatgtgcaattattgtcttgtgtttatgttctgtctccatgtgcactaattgatctgcacgcttgaaaatgctagacttctgaccatgttcgcttaatgctgtgttcttcaatatctcatgtcttgattttctagaaaagaacgaccagtcactatggttactctcacagtctgcaactttgaaaatatcattatatcatggtcaacatcatcaagagtctcatatcatggaaatggacactgtcccatccgctgccgacgaagagtctccttgaaaccctccaattccctgtaccccttgccctcaaaatacttcggtcccagatcatcggtgcgatagccctgtgggtaatatttgtccccgtcatcaccaggcaaaggatgtccaagtgcccatttaaaccatgccatcggcccccagcggttccagattgtgggctgcacatagaatggagctccgtcgtatatcaacacccagttgcggccgtgcttattcggtttgtcggtgaaagcgttcaagcgcaagaagtctgggcgtggcagtgataggtatcgcaggtatagttggcggagtttgaatatcaacgcaagtatgccgctgaaaaatgcaggtggttcttccatcctagaaaatgtacacattagactcgctgaatgtggtggtgagttgggatacatacatcatcgcggtccgcaatcgatctcccatcagatatgacacgaagtatctagccaacggcttcaagaaatttggcaagttatataccagcacgtcaatcgtcttttccgcaagctccttgttgcgggggtgtggcttcatgtgctggatttcgtattgctggctccatgcaccaatctcccccagccagtgaatcccatcctggaagccagtctttccagagggcaaagcatcataattgatttccaacgcatcaccgaggctcttccagaatgtcccgacagcacatcgttccatttcagtcatctcgcgccactcgaattgtttcacaaactggattggctcgagagcgaataagctcagtgtgtataacatgtcagcttccatgatcttgccgctagctctgtagcccttgtgcagaaatttggttcgggctattgctgtccgcgctcgctcggagcgtgggtcgaaagtcatgaattcgccgatcagtgtgcctgtgtcggcatatcttttgaatgatattgtagagtctgataactgtgatgtcttcaggagcagtgtggatattgtcggaatgccatatgtctgcccatgtcaacttccagtcatatacatacttggatgggctttgcatacgcggaagagggcaaactgcagtgacttaagcacaataaagggaaactcggtctgcatgattgtcttttgaataacccaggcatcctgatcggacatgctgcgcatggattgcctcgttccgtagcagctatatttactgtggagtgtctgccgtcgttggaaacggagtgaagatatcagcgctaggtatgttgctagccctagcaacatacatagtgtctgcttagacagtgaagcttgtagcaaggagctagatggagggacatcctcggtactggacgtaggtaatgatgccatttataacaaggcgacggaaatcactctgtagatatagatttaggtcttgagatagaaataatgtctattaagatcaattaattgcactcggtcttatatagattccatcctctatgaacatataaccttgatgacgattaatcgtgaagtatattgctgatctcatgttaagacgaccggaccgaggaagataggctgcggggaaatctcacatctcaaatgcataaatttttgtatatgggtgtacatcatgggatattgtgctaaatagaaatacctatgagctgtattcaactgtacaagagagccgtgtagtttcaatataccgaggtttgcaattaaacccgaatcattcgaccatccacgccctctgtgccagtccaatcaaatcttcatgaatcagcctgatcgacaacatactcggtatctcagtcggatggacttgagccagcatcgtacgatatatctatcccttgtctcccctcttttctcgctttgtactcgtgcttttttactgaggggctgccaatttctccgcctcgaaacacaaagcgtccttggttgcccacttccttggaaccctgcttgtctttaagagggtatgatcttcttctttagataatcggggaatgcgagaaatcacaggaccctgttcttgaactttcagcggtcttggcttcgttctctcatccatatcgtctgacatgcctaatagcttgcttatatgtattgtatgtagtttgatgtcgtcttgatcaggtccgtaactatgtacacatcgttatagatacatgcagtctccctctcattttagtgctattgtaatctcgccagcaccgcctcctccatcccgaacgatgatacctaggatccagacgttcacggcaaagaagaagagccctgcgagaaacagcccaggtacgaatgatgatagtcccaggaattcgagattgtaaccctggtgcagccagagggcctatatagttggtcagagttgaagccctgaagattctggtatcagaaaatcactagacaatacatacctgtccggcaatccatagtatggctgctgatatgcccagagccggtttacggatgagcgaggaagagggtaggtaaaatggaagcaggatgaggtaccagaggaaatactaaacagattagctgcgagtatgacaattttcggatggagtcacatacctgactggtacaaactttgttgaaagtgacaaaagtaaaagtctgcgcaagcatcgtagtagtcaagctcttctttgccaggaccagaggcaaagcaacaaccacaaggattagctgcggaaggaaggccagtgcctcaaagcgagtttcggccccacccgcagcagaaagatagagcagtgtactatagggagaaaaattgtggcggtgatcgatacgagtaagatggtggaagaaagtgtgatggaggaacggttgaccgtgctggaggtacatgacgagattcaatgccacgaaactggccagtgctgcaactgtaaacttcacccgggacggagtaatgaaccccaaagcctttgacagcagacccgagccagtcgttacagacccatcgcgctcagcatcccaccaccagagaatggagacaccatagatgaacgggtaaattttgaaatgcacagcaagacccaggataagcccagcaaggacaggcttcttcgtcaaagttgcccagaggagcgccgcaacaagcacaccgagcagtccctccgaactaccacgggtactgatattggcaaccatgggattccacagccaaacagccgaaacgtaccgcagcgcgcgctcgacgggaaattgatagcatcggacaagcagctggacaacgagccatccagcaaggacgtcagacaatgcaaaaagcgcctttccaaaggcgaaagtcagtgttgaccaaggcgtggcaccttcccacgcagtagggagaagcatccatgccaagagcggcgtgtagcggtaagtatcccgagtgtatggcgactcgccctttgcaacatagcgcgccgcatcagtgaacaccatgtaatcgatgtcggtgtatttcacggcggagtgcgcatcctgccagcctccatagacgaggaaaatgaggcggagggctgttgcggcgagaaagactcgcgctggagagtcgaagatagccattcccttacttgccaaaaacaaacactctttttcgtcctttgataacaaccaaataaagaaatcaaaggttgctaggttgtctgttgcggctagctcgcataattgggcggcttgatgaacccctggcggatgtcgtcggggaaaggaaggagctgcacatccaactaatctttttggatcttaaaatctgtagtgactgtgggcatgaattaattcgccttccattccataccattccgcttggtaaatcggatgtttacgtggaagataattgttgatgccacctcgaggctgatatccgctgactcagcatggtccgtgtccacgggtccgagattgcctaatcgggacgagaagtatacctccagggctaggtattgcacccttaacacgggagggctgctatggactggctgttcactgtttatgccttacttaggcttggggtttgagtatagtctatctcttgttggcgtctctcacagctgtacactgcctcgaattcctggggctatcatccttcgtgcctgggctgtttctcgcagagctcttcatagaatgaactgcccaaaccaaggtctttacccgacaagaacaagaaattcccactaatctacgttggaactgcaagatgtggggaaaacgtttatacccatgtctatgtcttcacgtttaaactatgtatcaggcaccggctaaatgcctcgaatttgacgcttctcaaacgtggctacagtgaatctcaatagaagcgtaggttggtaatcctttgaactcacttgtcgcagggatgatatctccggatgtatgagggtcaataatgctgcgatcgaaggttctgcttgaatacaagcagatcacaataaacctcatttagactatgtgagcgggccatgaaccacacagccgcctcaaagcacccaaaacgagaccattgacaaaaggcatgtgcagcgtaagcgagaagtaatcccttccaagtgagacccatcgttacagctcgggcctgtacaacatcactcaaaccccttctgcaagaagccatcgtccaattttagaattcgaccggccaaattgggacaattagatctgataggttagaggccgtcagatgatgtggtctacttctatgctaaaaaagaaataagacaggctagttataaatctcatttaaacctggctatagtcttaacatagatcgttcaattcattagccagagatgtactgcagatatatccatactatctgtgtatcttatataccaggatacgaagatggtgatcccctgcagaggaaacgaagctatattacaaacttcattatctccccagtccgccgtatcttttcatagacatttgacaacttcatcggagcttggtgattatagcgatacatctccttgtttattcttctctccgttgaagagacttcatcatggtcctgggcatgggaaagtatatcaatcgagggcttctcaacccaaagtccgatgagtctgcaaaggtcgagaatgctaggtcaccagtgagctcgacctccaaaaagataaaattccgccgccattgcaggcgattctggtgcttctacctcatcgccaatgtgatagtcttggcgattttcctaccggttttgtaagtcgcagtttttacatattctcctgtttgtgatcaaactaacattgccaaacaagctttctggtcgcgattcctgcagtcgcgcaactagttgtcaacaaatcagatctacgactcgtcaatgccgaagtgatgcacccaacggcagatacagtacgaatgacactagaggccaaggtgaatctgaagcttgcactaggcgttcggctcgatcccgttgtcttctacgcatttgtgcgctccgcaggccacgagaatgcatatgcaggaattgagatccccggacaaactatcaagggaaattattcacttaaagtcaccgaccagttgacgccaatcctcaatatgacttcctgggaaacttttgtgagtcaagctgtctcccaaaaggaaacagcattatcactccatggagtgactgttggatatctcggggtcctgaaaaaccacatcatattggataaagatgtggtaatgccaagtgagtcgctcgctagagtggtattccacggtttgctaatcttcgagatagctttaaacaagtttgaaggcttctccatcgcgaacagtacattcctcttaccggcagaggacgatggaaccaatctcgttgccaatattacacttccaaacccctccgtcctcagcttcgaagttggcaccatcacacttgacctcaaaagcggcaatacagacctagtcatcggcaacgcaacggtcaaagacgtcacacttagacctggaaacaacacattcccgttgagaggtgtgatcgacattggtgcgatgatcggcaacctcagcgaagttcttagctcacagggccccgccatcaggacaggcgcactgagcctgacagctgtgaccagatctattgtatctaacggcactctaatcccgtactatacaaaggtcctcgggtcacttcccctcgtggcaaacgtgagcattggcgacgttcttagaaactcgctcgctcatctgggctcgagtgaaacattgtcagacttcgatgacaaacgcaggagaggccctgtacagttgggtggcccggttggatacggtgtcgcgtataaccaggtcgcaagtctgaaacacaacagacacgttcaaaagatgttcgaggatgaagatcccgaacgacgagacgcaattatagaatcgctggctcgatattatgcttcactatgaatgtacacttttacttcaattggatttaacaatacctcagtgacagttttcttcctgaattaaatcttgatatctggttcgctaggggtggatcgaccattgaggcaatgagccaatagtggtcatcatcctagtgtccaaggatgaatgaagctgttgtggattaagatcccatttttgtgccaaccgtatcatgaaaaacgagaaaaatcagaaatcctacagtacattgagatccttgaagcattgaatggaaagttaagtctgtcatacgttcatttccacatatcccctatgctaacatgctgagaattcacacaaacaaggcaataatagagttgggaagagaagagaagagaacaagatttcagtagtaaagcccgccatttgtgaaaaaaacagggtccggcatggcatcaaaatacgtcgattgttctccgaatttcagacctttctcatgatccggggtcaacaaagacatcgtgtcgttcctctcatcaacatcagcggcaatccccggccacaaattgttgtcactccaactcagatactcccagagatactgggcccccgaatcatccgtgaacggggtattagcgagggggtcaaggaacccattctcgcccatgttaccacgacatgtattagacgccgcgaatatgagcgacatatcccgatcagcgggataagagccaccaaaaatgctagcggaagaatcaggatcagcgaggtcctgcccccgcttgctagcctcgtagatacgcgagatagcatccagcgatcgcttcgccgtatggccaaaggactgcatacgggccagagtcatcatagccatttccacctgtacttgacaggactcaatggaagcacgggggtcatttaccgttggatcgttgaggaacaatcccactaagggcaccagagaagcctggaaggtccaccaaacagcattccatccgcacaattggttaagctgcgctgtagcggcaatattccgaatagattcttctgcgacttggcgacatttttcaatcgcagtgcgctcctcggatcgcagtgctatataaggcacacgtcgcatggcgtagttgagcagtgttggtcggtacaggaggatccgctggttataatagcgccagcgcattactgtgcggacagtttttattgactccgagcagggctggtggtctttcaggacggaggggaggttgtcccaccactctaggagctgtgcatctgcgtgggccatttcttggtgcttgactagcggtgctgcggcgagggactcttggacttgggttgcgattttggcgaagcgaatgttttccactaaggggaggatctcgaggacgtttccctattagaatgacattagtcaaacgatcgtttttttttttctttctagagtgtaacagggcctaccttatctcgacatagagggggtttaactgtaatgttcgagcctatccgacccatactaggtcggcctagcgtcatgccggcccaggtatccatgcagaacaaagaccaccagacgcggcgcttaagatccatggaggctagcttggccggactcgatatttgatgagtctccgtaaactccttgtgcaatcctagggcagccgccatacgcagcgcggcacccataatggagtatgctagattcggctgactgatatagtgacagtaccagccccccatcagtcccagcgcctggatagtctcgatatgggagcttcccaaggaactcagagttaagtgacccttgaatcgcaggaagtatgtctggtgtgttacatcatcgggtcctgtagcagcaatgcaaccgagagcaagaacaatgttcagcagagcaagccaatggtcatctctccgacgaccagagcagtaagcctcacggaaggagggctcatcgatcatgggagcgaaggcttggaaatagaggaaatatgcatcgagcatttgcatctctgaaggtggaatagggggctgtgagggtgtgggaggcgcaagatgcggccatcctatcgcattttcctgttcattcacgggcgtacgcgaaaagtacggggcacagcctggatccaaccagacaataaccttgatcacagcctggatagatgatacacccaggtaagatgaaggttggcgagccgacagcgacaagccattaacatcatctgagacgccctctactagatcagaggagctagtattacggctatcgggtagttcctcaggcatagtttgcagggcctcgaggttgtcatcgtcattcgataacggtgagacatgggcttccagcgaagccgatgtcgatggtgaatcggtctgatgtgacagtgcttgcatatgagagctcgatggagtggttatgagctcaaggagtttctcacgtggcaaatttgccaatgactctggagagaagttggggaataactttcccaagatacctcgatactcttccagggtggtagatagcttttctacgtgtctgtgtatattaaactggttagatggttggggttagaataaagcaatgggcaaggctcacctccgtgatggccgtgggtctgaatagtggcactggtctgacttcttataccaccgacatgcctcacatggcttctcgccatcacacttgatcttgcgatggcgacaagatgtacaagcgcgcaaggttgtcacacggcgactaatggaatcacgcctttcactagtggaccggttacgggcaggagttgctgccgtaggattttcgaaaccctcgaatgtatggaacattgctgatgctatgaattcacgaccaccgtgtggtcaatgagtaggccatatggatcagtagaataagagtgtatgatgtttccgttgaatcgagacagttcttcacattgtggaaaggtggcaagtcatatgtgcaaggagatagaaaaaaggttccaagcgaaaacgccgattaagaaaaagcagggtaataataagaaaaaaataggctgatccgcataaatatccccgcattttgttggatttgaacgatgcaagtctttttataggctagtgatctccgcgacaactgaggtttcgagtcccgacctgcctaatatcccgggaattgccacgccagcatgaacaggggtggcagatttgctatacagaataaatctcttccttccagtattcaaacgccacagagcgtgcatggtagggtactcggcactccctggtgtggcatggattccccgaagtgaggggcaatttccccagactcactttaggaaatcatcatgagccctgcaagatgggactagacgatcgtataggaagatcactagctctgcatgtccgttctcgcatggggtccagtaccaggcaatttccctttgaccggattttccaacctgtttcgccaatcaacgtgtcaaacctcttcttagcgccatgctccgtgtgctccggagtacggagtataccataatggctctaagcccgacgccgaggcctggaatgagggattttcacgaatcaaggagcaggtgctcatttccacttatgcttaccccgtgtatcaggaggggcaaggtgcgacggcacatctcgccactggggttcggtgccgagatactttcgcgccatgtctctttcgagtcaagggcccgaaatggggacacgaacggtcaggagttcacgccttattttctcttattctcgaagcgacaaagaggccaagagagtcaaactcgaaattatttaaagccagcactgtgcagagctccacgttttgatcattgatctccggggaaattaccggggcatgccaagcctgtgggatgaaagggagccgaagggtgcaggacgcccgttgcctgccaatgttcaaccgtcattggttcggttgtgactcttgtgacgaacgatgcatactaacggtaattggtgcaataataataagttcgatataggcagtgtcatgacctaaaaaagctgcctgcgcgcggggaaggcagatggtatgcaggtccatcagtccagagagtctgcaagtttatgatatcagaaactgatggaaagaaacccgaacatcaacaatgcatgttatgttgagcttgacgggaccttttccgtggccaacaaagctcttgggtggatataagaaccccaggggttgacattgctgagtgggacctcgggagatatggttgaaattttgccgttttgcaaattctcattctttcactgtatttgcagaatacaagttgcaaatatacaggtcacgtgccacactagtcccttttggacacggccaaaggaagtctccgggcttatcgataaggacaagtcggtctccacctaactatccatggatgtataagtccggggtagaccaagcaacctcctgtatattgccaattgcttttcaaaatggctaagatcatacactctctttcttctgactggtccttcaaggatcgggacaccgacgaatggctgccagtggcttcggtcccatctgtggtacaacaggatctcattgctaacaacaagtgagctgggtttgttagacgaaacgtttcaaatctaaaaggtctctttcaacaggctcgatgatccttatatcggattcaaagaattgaacgcccgctgggtcaacgagaagacgtgggtttaccgaaaggtggtggagaagccatccgtccccgccggctctgcaattgtactggtcttcgacggtcttgatacatttgccaaggtcaagatggatgaacaagtgatcttggagagtgataacatgttcctgggccaccgagtggacgtcaccaaagcattggaagcagaggacgaacacacgctcgagattgagttcgactgtgcactcgtcaaggcacgcgagctccgatcccagcacacgaaacataaatgggtcgggttcaatggtgatctatctcgcttggctgtgcgaaaagctcagtatcactggggctgggactggggtccagtgttgatgaccgcgggcatctggcgtgccgtacggttcgaggtgtatcaagctcgcgtggccaatatttggccccaaacacagctatctgcagaccaccaggcagctgatgtaacggtcgttattgatgtggagagtgtcggtgatcgggaatatacggcccagtttagccttggcttaaaaggaaacgagattgcaagcaagactatccctgtgtccgagagaacaactcaagtaaaattcccagtcgacaaaccggctctgtggtggccccatggatatggcgagcagactctgtacgacatgtcggtgtcgctacttcgcaatggtgaacaagttgaccagacatctaaaaagtttggtatccgggccgccgagatcgttcaacaaccggacaagcatggcaaatcctttttcgtccgactcaatggaatggacattttctgcggcggttcgtgttggattccggcagacagtctactccctgctgtcagtgctgagcgataccgcaagtggattgaacttctggtcgctggcagacaagtgatgatacggtaagttttgttttcctatgtgttctcggatgtggatttagctaacgttgaacaagtgtctggggtggtggtatatatgaagacgactccttctatgaggcctgcgatgaattgggagtactggtctggcaagattttatgtttgggtgtggtaattatcccacatggcctaagatgctcgagtctatccgtcaagaggcaatctacaatttggagcgtatgcgccaccatccttcgattgtgctctatgcgggcaacaacgaggactatcaagtggcagagtcagaaggcttgacctataactacgaagataaagacccggagaactggttgaaaacagattttccagcacgatacatctatgagaagctgcttccagatctggtggctaaatactcacctggcacattctatcaccctgggagtccatggggagatggcaagatatcgtcagattccactgttggtgatctacaccaatggaacggtcagtgttctctaacaaatctcgaatcattgcgctaatcactagaatagtgtggcatggaacgcaggagaaataccaaattttcgatactctgggcggtcggttcaacagcgagtttggaatggaggcattcccccatatctctaccattgactacttcgtcgagaatccagaggacaaatttcctcaatcccaggtgattgacttccacaacaaggccgacggtcatgaacgaagactggctacgtaccttgtagagaatctacggtccgccacagacctcgaggtatgaccacccgtgatgaccaccgatgcaggctaacgtctccagacctatatctatctcactcaagttgtacaagcagagaccatgatgtttggctaccgaggctggcgtcagcaatggggcgacgagcgacactgcggtggtgcactgctctggcagctgaacgactgctggccgacaatctcatgggccatcgtggactacttccttaggccaaaaccagcgtactacgccgttaagcgggtcttgaacccgatcgccatcggggtccgacgtgagcaccacgactggagcgtgtcacacgcccaaccggccaagaccagcaagtacgaactttggatcgccagcaatcaacccaagaccgtacaaggcagtatcgagctgcggttcctatctgtcaacacaggccgcgatcttcgggctccgatcgcgcgcgaaaatatcaccattgctgccaatggcaccacggacatcatcaatggtgttctcgaccacatcgccgagccagaaccgcatgtcctcgccgcccggttatgggttgacaaccaggtcgtagcacgtgatgtcgactggccacagccattgaagtatctcaatctgtccgagcgacaggtagaggtaaagaggcagacagggaaatctggtgagacggtgttggtgatcagtgcctgcaagccggttaagtgtcttgtgttcaaggagcaagagggtgtacagcttgcggacaacgctatcgacattgtccctggtgatgagcagacagtcagagttactggccttggaagtgagcctctaaggtaccggtacttaggacaagtctcatgcgaagtggtcgaatgagtggctactacctatgctatatagcagtgggcaatatgattataaggggcagaagcacttcaaataccaggcataattctcatgaatatcaatagatgtacgatgtagtacatattagacaacgactaagagacgatcatctcatatcttatcggccctggggagatctgaacttaacaacctccaactttttgccaatgggtaccaaacgcgactgggaaggccagccacttgagctgcatcctaaagatacaatcatggcagaagcagagtcagctccttcaatcctgtcaatctttgagaacttccgcgacgagctggacgagcaccatgaccgccgcgagcgtatcatcaagaaaagccgcgacattaccgccttgagcaagaagatgtatgcctccacttccagctcaagaagagcaccactaactaggattcttttagcatcttcgcccttcaacgagtccgcgcaacgaaccaacccatcccacctaaaatcgcccaagaaaaccaaacccgcttcgaccaaatccaggcactgttcgaagctgtcgtccccgaacaattagggataaatggctggcgataccagcgccaaatcagccctggaatccaggaattcatcgaagccatctccttcgaccactacctacgcacggaaacgctaatcacgcacgccgagtgctccgcccgcgtcccaccacaaatactcatttcagaagaagactacctactgggcctgtttgatctcacgggagagatgatgcgcttcgcggttctatctctgagctccgggaatacaactgctacccaagtgaccaagaacacaacaaacgaaagcgagaaatcgccggtcgctgcgtcccagggtggcatcgtggttgatctacgtgctatgcgcgcaggatttgaggcgctcagtgtgccacagcggcattacatgttccgggatatggcgaagaagctggatgtgatgcagaacagtgtggaaaaggttgagcgggcggcgtatgggattgtcgttcgtgggagtgagaggccgagtgggtggacgcctgatctgtcgggcgcgatggaggtggcatcctactaggaaactacgtatcatgaagtatccagcaatgatcgatggcttattttgattgacagcgtagtccgttatagttcggggggttgcatggctattcatatgccaggaactatacagaacttgacaatcaagtcttctcccgcttgatgtcttaatatcccctattaataacttactccgacattttatgacaatcgcatattccatattgacattgctgtaccgacaggtgcgtcaccgtgacatcactagttcagaacggtaaagaccgtagaagcccgttgtagggacaggttgggtgtaaaaggaaaagacaaagcatttccaattgcaaaaaaacaaagcaagaaaaacgccttcgtaaaacgatcgtgtcacccatatcccatagcaccaagagccaaagttacggccatgttgactgtagacggccaaatcagacgggcgagcgtgggttctcatcctcggagagaataccctgcgaaatcaggtcttcgggctgtggccggttctgaatcttatgctcgaggttatcggccagcatgtgcttctcgagttcacgggcaggggcctgcagcgctggggcagcggaggttgcggggaggatattaccttggcgggttgttagtatattgagaggaactcaggtaccaatctcaggcacgaaatgaaagtgaaaaaatgggaaatgggaaatgatctatcgaatcagaaggaaaaaagaaaggaaaacaaacgctcaaccaactcgtccttctcaggcctcttctccaggttcttcttcagactgtcagtagcacgctggcggtcgagcacctggcgggcagattgaatcgctctatccttgtgttaacgatcatatctcacgagactcatgggactattcccgaagcactcacggagctacattggtgtccagcaggatgtggcggttcttgaggtcctgcatttccgggcgggtttggaggtgtttctccagcgagttgcgacgctcgtaggttgggggaagtgactgctgaacggaggacattgtacttgtcgcaagtaatgatagtcaaagtgttgttaagaagtggaatcagtcgaggaatggagaaggcgaaagtcaagtggtggtcccgtgggacaatcacgcggggaaagcggcggtctatacatcgacaccatatcaccgtgaaactacaccaaagggaaaatatcaagaataatgcaatttactgggataatctaggataatctgggatgctagtagatcataaaacaaaaaaatacaatccaccttcataccatctcccagcgcaaaacagaaagcaaccgtctcaacgtctccgcaatttgacgatctcccatctccgtctcctaagaaaagggtgaaaggggaaaaagggggggcacaggttttccgaagtagacatatccaagcagcgcatcacagccgcgggtcgaatccaccaagggattcgtgtcttttcgtgtccgagatccgaatcatgccggggttctgggatcgtttatgccagaggaagagggaaaagcgcactctgcaggcaatcacagcaagacagatccagatccagatccccgcattcgggggtttattgcagtccagcaaagagaaaagagacacccctgtccagttctggatgcattggttcacaaaacactccagtctactgtcatcaagagatgatttgaaggtagactgttctgctcatgctaatcaaggaacccagagcttaccccggccacgaccattgcctcgtgcaccgcgcgaagatccaccacggcgactattggatgagcggcgagaggccccagcgttaccacgggcagcaccggtggcacccgcaacaccctgttgggtactcaagtctatagtggtcggcttggttgcgccgcccagagaccggctgaaagagtcggggtctatgggcttggtaggaacttccacggtaggtgtaggctcagcaggaggtggcgcagccttaggggcagccttgcgctgacccccaccacgcgaagcacctcgagtagttccttttccacgaccgcgggggacgaaaactagctcatcctcgtcgctctcttcctcgtaggacaacagagtcttcggttcagcgggctgggcctgagttttctcgacgtatttgcagcggtttttgtactcgcgctcctcgtactggatagcggtgcgtagctgcagaatgttcttgacaccaatgccaaacttctgagcccacacctgggtcgcacggtcattggagataagaatgcaggtcttggctgaattctcggcatcggggccggcatgcaaccgccagagcagagcgctcagcaatgggcgcagagcgggcggtgcggtcgggatgacggatccggagatggtacgctggtggttagaggacttgctcttggtcctgtcattctttgttgcttcattgccggacccgtgctgggcacactcggggctggtacgggaactgcgagaggatgtgcgcgatccaggtccactgggggtgccgacggaggtgatcgacaccgtctccgggtccttcttgaagttcagcttggacaagagcatctgcgacaggtcatccgactcgttcttggtcaaagtatcgcgggcgctagtttcgatcgctggctcgtcattgtatgtctcgtcaactacctcgggctcctcttcgaattccggcaggaagaatttctcggcctcctcccagcgctcgtattgctccatggggccctggagtagaactcggtcggcagcgatgtggtctttgccggaagtgacccggtcaagaaagcgaactgcttcgcgcgcattgatggcgatctgcgaccctgctcgcttcagcgcatggagtcgttcaagtgctaattagaggataatggttagaccggcaaacgctgcagtgagacaatcaaagtctcttcaacattcgggtactcactgtagagaggaactacgagatcgatagccccattagtagtccattttttgatttcgctaatattggtggagagggccgtctcgtccacggcacagcggaagaccttgcgtccggtcgacatggcggataccaaacgtactcgttcgtatgttggtaaagagtgggagatacagggcaaagaccaccctatatcgcaagactagaattgtagacaaccgcgactaaatcggggccagggtcagcacgggcctagagctgaggaaggaggtttgatgatggagggacctgggaatgtggggggggtaaggggagtagtgggatgtcggttgatagagccatgattttcactcacgatgagaatccagttgacaggatgtttccatctgcagcatctttgtaacaatacagtctgcttggggtcaaagaacgcaccttgagaaatgatgcgatgggcagagaaggaaatatgctgactaagcgcgttataggaacaagacgggatttaaagagagaagtgagggtttctatatatcgaagagggatacagtctaagaataggaagagaaagaaagaaaagatcatgtttgtgaaggaaagggttccaaagccatcatcccagcctatgacttcaccttcttgatgaggccgtccgattccttcactcgttgcgcccactcactggttttgatgttcatattagtactagtagcaacatttgaagtacaagggaaactttgttatacttacgtccaactgccgtcatatacccgacgcaggtttgggtcgccatattcggcctcactcagagctgtctcaatgatggaggcagtcacgccagtaccacacgagctgataattgtttggtttggatccaccttgtggtcttcaaaaacctttcgcaagtcttcaacggggagataggctttggtttcagggtcgaggagttcttggaagggcaagctcttggagccaggaatatggcccgaagagaggccagggcgcggctctggatcggttccagcccagcgaccataggagcgtgcatctaggatctctatttcctctgcaccttctttgccatagtcaaatgctaactccttcatctctcggaaggagatcactagtcgcgagtcgtacgtcggaacagagtacttcgacttctccaccaccgctggctcgccgctctcagtcggaagaccgtctttgatccagagacgatagttgttgaggatatgtacattgggatggccgaaaacacgaagggtccagcctacacgcggcgcactgaatatgcccagctcggcagtgtcgtataccaccaccgagtcgtcgcgacggatccccaattcgctcatggcctcggcaaaggtctcgcaagtgggaagcatgtgtgggtagggtgaatcttgatctttgatagcatcaaggtcaaagaatcgggcctgggggatgcgcgagttacggaacgagtcaattcccttgcgtccctctgggtcgttcggcatgaaccatgctgcacagagaggaatcacgcgcggggaagttgagatctttgtccggggattcttcttgagtgcttcattcagctgctttggggtcactagatacgaagaaaaagagacattgcgctgagtatggagccctgtggagaccgacatgttggggcggaagagacgagcagaagcaaaggatctggcagtgaaagccatggtggagaggaaagaagctttttaaaagaccaatttacataacgaggtagcaaagactcggggaaatatccaaatgcaagccagaccaaccacgagtaagaggaagcggaagagcagggaagagcaataagaggagtactattgcgtgttatggcggcatgtgtggaggtgcggagagtggacatgtgataggaggctgataggagagataagcggtgttgaccgatgctttccctctcttcacctttcttgattctccactatcccaccccacaatgaaggtcgctattaaagaatggaatgccgtcgctacttggcattggaatatccccgaggacgaggtgtgtggcatctgtcgtgtccagttcgatggcacctgtccaacctgcaaattccccggcgatgactgcgcacttggtgagtgaacctttgactcccaattccatacggaatactgaccacggtgattattatagtgcaaggaagatgtaaccacgcgttccatatggtaagactgcggagtgggcatatgagctatccctagactaatcaacactttggaaacagcactgcttaatgacctggattgacctggaatcttccaagggactatgtccaatgtgccgacaaagtaagctttactctgcattgtctgtgatatcgagctaactgtctccagaattcgaatggaaggacaaggaataacggcccaatttgtgttttcttcttctcatcaatggttatcaaggcgttgtcggacgaattcaagataccccctttgcatttttgttgggcgccaaattagattggaggagttggtgggacctcaatctcaactgagcatcaaattaatcccgtggttggagcgacttcgattaaaccgagtttatacttcgtattcgaccttccatttgtcgatatatattgttgcagatcgcgccatagattagtcgactcatacaatacccaagccccaaggagcctaccaactaccatataaatacaatcaccatgaagaacgcagaataatcctaacgtctcagggtgaaacatgtaccaatatcaaagtcgcttgatcccctcggaaggtccggccgttgtcgtctctcgtctgatcgtcacgtggcgctatcgataagaagctctccgcacgcgatacagaacctcgtcctaacctaagctcctctccagaatgatgtagccttggcctatggagatgtctctgaacaactctccctatcatcctcccctatcctcttcttcgtctaggcagtccctgcacaaagaagcactgtttcgaccaggcaccgcctcttcgcggccaagtgatcgacagtccagagggcaactgcctgagggccgcccatcaacagacgaaactcatcaacccccgggaacaactgccttgccctgccaagatgaagctctggatgagaccgaagatcattctgaggaaggccaagaaaatctgactcatcccacattccagccgttcttcgccttgattgaagacgcccatacctcagactaccaccacccaacagtccactacatattctccgacgatgacaccgagatcgtgacagaggcagccctgcgtagcttggccgcgcagcaagaagctctttccgattccaagaaagatcagatcgcgcagacccaatcgcccactctgcaggacgagatgaaagatccctccgacccggacctagccaagtccaccctactcccaccgtccgttccaggtatccgagataattatgtcattctcgacatagagccctcaccacacacacctgacgtagggcaaactagtcctataaccgaacaactagcaccgggcaaaggcgggggcggtacaaggtccatatcctcgtcaccggcgaacccttccgtgctcccacaggatcaggggcagttacacccgcagtatcgcgttaccgcggcgcagagcttctcgtcaacttggcaggttctcagtacggaagtggcgacggcgcccacctttgagaataacaattccggcgaatcaccaggacaggggttgatgctgaagatccgtggcacaggtggactgccgattgaggtaggtaacacggagaaggaccgtacactggaagagatgatggaccagtttgcaaagcggatgagcgagttgcaggttgttatcgatgctgcggaggccgtggatttgaaagaagaatataccgaagaagaagttgtgcaacatcctttctctcaagacacggctgaagagactacccagggcgagggggatagtgctgcatatgctgcaaaggttgaaggggaacattcttgatgattttatatttgctgtttttggcgcattgtgcggaacatcggctgttgtactaagtctagtctattaacaggctagaaccggtaaaccttatgaatatatcttgaatacaagatgaatcaatccaaactaggagatcgggtatgatattaagatcaaatttgacatcccgataagaatatcaatgtagttgaaccggaaacgccatgtacagtcgcctttctatggaactcagacaaaagaggagatagaagagaatgtccaacccaacactgttttctcagccaaaaactccgacccagagtggaaagccaagcgactatcgggtatcaaaaatcgacaagaaaggagaaaaaaccaaaagcaaaaattaacatggagtccacctaatcagaggtgcggtttctgaaccttcgactaccggcgatggctgaagggggcatattttcgcgaccctccttcatgccagccatcctttttgagagcatggttttggggagtttagtcccgggattgttggttgagttcgagcggcgccgtttgcgggaaggttctggctcttccttttctggcgtttcgtccaggtccaaggatgtggccaacgcgggggtttctggtttgatgggaggtagtacgtcctcaccatcagacacaaccggtctggcgacgtttaagtcgacttccctaaggccagtgttggatggtggagctgcgaatgatggaagagagtggcctacctcttccggggtatcattatacacgaatttcttggacggtgaagcatgtggcgaagtgggagcaggggaatctggttgtcccccctcactgaatggcagagcagtaaactgcttggatgtccggtgtcgagtgcgaagaccgtcgtgagcttccgtttggggcatttccgaagggtattcgtagcgtcgtttctgaggggttatacctgttcgaacatactctttcagggggcggctctggatgttggaccgcatttccaaaagtggctggcgcacttcagcgtgtaggggtgcagtagtttgttccaggttcttggtaagcatatcgacatcctcctggagttgctcgacgcgtccagtgaacgtattgagttgcccatagacgtttgagcgtgactctcggaccgtattagccatggtattcaaactgcctaggtgtgattcatggaagcggccattctgggaccgtgctttggcaacgaagtcatccaaagcctccatttgtgtgctcatgtcgctcatctgagcatcaacaatgcgcacagtctcttggtgcacagattccgttgcccgatgaattgaggcgttgcgctggtcgaaagtctactgctattagtttcattccgcaacccaaggatgtcagtcggtcttacctcccagtcattctgcatcctggttttgatttcatccttggatgcagtaatgtccttggcaaactgctcctccttgaaaatccattcatcaatgtgcctgtcgtgctgcgcagtcgcttgctcaagagagtcgcctgatgccgagatgtcggtgcgaagggtattaaatttgccctgaaggcggttgttctgtttcaggcttgagtcctcaaggagtccccggatgtgagacataagagtttcgcgctcgacttgtgcactcgcatgttcctcttcgagaacctgtgctagattgaatgaagcttttctattggcctccactgtctgacggttagctgcctgcagctggagacgtagtctgtggacttcggatttctgttcatcgatgtgctttgccatgccctcgaacatggtcttgaagtctttgccgagtgtgctgtatgacgagtgaagttgcgagtgaaactctgagaactccccaatgacctcttcggagattcgagcagcagcagccgacaagccattcaggccttcgccaactttggacttaacctcttctcggaggaccttgatctcctcgagaacttcattcatcttgtcccgggcagtggatgtgttattcttggcctcggcctcagcattgtcaaacgatgcatcaagatccttaaggtgggagcgggtagaccgcacagtgtcgagttcatggtctacgaattggtggatcttgctagacatctcctcgagcagcttcgcatgctgcgtctggaacatctgcatgcgagcatcgactcgctccgtgacatgcgatacctcaccggttgaagcctgccatgttttttggttatcagtctccaggttatctttgcgatccagtttcgcgtgcagtccattcacgtcttgaatagttccatttaaggtagtcaccaggccggcaccaatgtgacgaagttgcttttccgtattttgatgagccttccgcacaatcttctcctcgtccagcttctcctgggtatccttccaaaacctttctgtttcgttgagcacatcgcgcgtttctttgagtttggactcaatctcctcattgtcatgctttaatgagttaaagttgcctgtgatcaaaagtagctcttgaaccttgtggcgaaggcttgcctccatcgactcaatcttggcacgctgttcctcgttgacgatgcggcgcgactcactttccatcgtcatttgttcaaacgcatcaggcgtcatatagacaccattgcgatgccgggtggcaatgagctcgcttttgagcttctgaatttccatcccgatatctcgcagaagcttagttttggtgattatagaattaatctggggtttgttgcgaatgttcttggctcgaaaggcataatcaagggtagatatggtctcctctaggttgcttcgggcaggcgagacggtggcgatgatgcatgtttttgtttgccctccaagtgaatcttgtagcagtctcgtaagtttcgactcgcggtaaggaatgtgggagctcttatccaccagagcgttgatcaccctcccaagagtgagtagactcttgttaatgagacctgcctccgtcgcccgtttattttctgcaccgctccgtccgatattttcgctacccgcgagatcaaccaggttcaacttgcccgagctgacatagtcctccccagattcggtcgtgcgatttgtgagcacggtgatggtaaaaactgtatggcttcgggaactcaggtcattgcattttgtcgctgccacttggcgtttatggctgcccgattgaagtaatcggattccggtggacgcagagtcgatgtaagtctcctccatgccctgaaccatggtgccgtgtcctcccttcttctcattttcgaaaatcttgagcttggtgctatcgtcgtatgacagaagatcgcgaagttcttcattataaagttcgataaaggaacatttcactgtgctttctgtgtcctccagcttgcgaaagagggcgtaaagcgtacgcggaataattcctgcgtcgtcggagaggatgcccaatgtgtcattcatgtctcctgacatggtgtatgtctttcctgttccagtctgtccgtaagcgaagattgtgcaattgtaacctgccaacatctgcaaggaattagcgcggtcctttgggttcagtcgcggcgactatactaacctcgtcgaggaccggtacaaccacatcctcgtagacagtagcttgatcggcagccggggagaagaccttgtcaaaagcatatgtcttgtttgaaaccgcgttcggtcccatcgagagatcgagggttttgcccttcacaccctctggtgttgacaagactacaccgttattctccttaatctcgcgatcactgcgaccgcgacaccggactaccacatggatgcttgtgtcctcgttgatttcccgttcgaaatctttctccctcctcttattcgcagcgcccgatttttctgggctcctcgccacacgagctgcacttatcgcagaggacctcactgatggcgtagatactccaggtagtgcatggcgttctggggctgccgaacccgctcgtcgaactggttggcgcaaacccgacctcctcgtggtggggagggtggatggaggccttggtgggccagccatgttgacaatgcgacactcggaatgtaattgtggtattatttagcagtaatattcgagggtccgtctgaaagttcagttgatcttttgatttgatattttcacaagctgtgtcggagtctttcacggttgtgtatatcagtggagcttcgtctcaaacaggagcaacataaacaaacattacgtaatccaatcatttccccctcgcacatgactcggttggtcggctgcgctatcgtcatcgctctcttatcgttatccttccccctcataccgtcccttacatctccagagcctccccttttaactacacaaagctcgactatcgtatggacttttgtccacccatgaacaccgggccatgaaaacgaacaaaccatcatgactacctcttcttcctcagcccaggcgcaaatcttccctgggaaaggactggggtttatcagtatgtttctttgtctaacctcgcagccttttcagcagctctcgctaatactcttgaagccttgggtgcttcgctccataatgtccttacccgcgtcaagtcctatccccaaacctatcccgccatcgacctagcctactcccccgcagatccgctccgcaagccggtgatattgcagttaccttcaaatggcctgcgccttcgatttgacggtcccgaccagaggctccgtttgattgaagtagtcgacttctctcgagtaaacctggtatacaaaaatcaggatgtgctcaaaggtgggaagtcagcagaacaacccttgtcctcgcacggccctagcttccggcacgtctacaatcgcttgtttggcccctcatacccaggagaatacgtacccccggcagacccacagtcgccatatggaacctacgtcctttcttatccgggggttgcattctcgtttccccttcagcactctgcctggtcagatcagtgtgattttgtagcgttgctatcttcctcagctgcgctcccggccacatccatgtcgatcttccaaggggcatcatggcctgaggcccgaggcaagttgttcacacaacaggcacagtacccacgctcgtcggctttgattggaaaatcacgagaatcgctagcggatgaaatcgaggagtggcatgtcctaggtgctggggaacttcaagtggctcgcaggacgggctctccattatacataaaactgggggagacgactccccaggacttgattgcagacttcggtccacccgacgcagtctaccgtaagaacgaccgccggatctcgatccaccgtgcaactgggggtggggaatctcacctgagtccctctccgggcagaggaatagacatcccggacggcgaccactcatccactaacagcgtaactgatgattctgacgaagagttggctaccttcaatatcggagaccccacctcactgcccgcagaatgctttttgaactacttccaccatggattcgatgccttcatctcgtatccgactacacctggacctgctttccccgcctcgggtcttccagatccatcgcctcagccaccatcctcccagctgacagtgacaaagattattcttcatgggaacgtcccaggttcttatccatttaatcgtcaccgccgaagtcgctggttaatctcgttggatgaatctggcgattgtctgacttcggaatcgacatacgatgaaatctcggagcggctgcgggctacttggaaaggatcttacgccagccccgccgaggagcgtgctctgcagcggccaatggtactgaaccgcggctggggagacagccccgagagcagtgttgagttccttggtggttgggaggagaccacagccaaaggtcctcggaatggtgccgatgggcaggatggaggattaggtaataccgagctttttgggttcccggggcttttatttgaagttctcaagaatggcgccgtgagttgtttgacagtgtactgatttaagactattgcacccagcgcttctcaccatatctcaatgcattatgaatcatgataatcctggcttggtatgttttaatgtgaaactatatgtgaccattcaaaacctggattgtagatgtaaattgtagaattgatacctaatgtccattctccaatagcctcgcaatttccgtttgattcaaatttcttgcccactcaatgactgtacaaccatttccatcctcgatgttagtatccgctcctcgaccgagcaagaaccttattgcatccagtttcccaagctctgttgctatgtgtaaaggggttcccaaactcacaggatagaaccgcctaaaggttggataatcctgatacattgggacgttcaaaggggcacctttatcaataagtagcgccaacacttcattgagatttgtccgccgataaatggcatattgaaggagctgtccctgttgtacatcacctccgcggcttagtatgagctcgatgatgtttataagagctagctggacagcataagatagcggagtacagttaatatcacatcgttgattgggatttgctccatggtctagaagccagttcgtcatctcttcctcgtagattgcatagctatggtaacgagttattattgtgtttcttttcaagaaatgaaagcaagattctcatccttcgaatcactgactttagaacggggggatcaaggtcacttatacgttcattgatgtcccatcctttttgcatgaagcatttgagcgctttcttcgatttacatttcattgcttccaatggaaaatatgaatgtatcgtaagcccacggtcgagaagttctgaaatgaattgagtattgtcttgcttgattgcctctaccatcaccgggacaagttcctgtatgacatgtttcgggctcgagggcagtagagcgatagtatcattgaaggattgtatatctcctctgaagcgaaatctgtcaactgctcggttgtttctttcgggatttgacgtgggatgtgaaattgatttaactcgatgggtgtaatagatgagataggtggctcacacaaccatgatcgaagatccatgataacacacaggttatctgtgagagcaaaaatgaagtctcctaggaggtgtgagatgtacgacctcagcggggttgatgatgtacgacaggtctcgcagtgggcttttgccatcttcccccctctaagagatcggaatctcgtataactaccaacagtaagcgataatagatatgcatctggccctgtacattgaccgctagttccccgttgatttgtttctcttcctataaaatcctacaagcagaaattatatcccttccactcttactcctctgaagtcccgggagatttggtccctgtctctactccatcgattgttttctgtttggcagtgatcatgtctaccgactcagcctcttggactactgtccaggattttctgcaaaaaagtgatagccaaactgccgagtgttttcgtcgaactcaatgggatgagctctgtccaatcgcttcaggtcttgctggacacttggagtgcgtggccttagaccaggttgctagcgggctcaatcacattgtccgtttgctaaaattttccgacgagactcgctgggcggcccgggttcatattagaaggagtacctccccccttgtcagcaagaccagcctcagaaacgaggttgcgacaatgcaattcatcaaggaacgttccgtcttgccagtgcctcaagtttttgcgtatgaagttgacgagaccaacccggtgagggttccttttatactgatggagctgctccctggtagcgtcgccatggacgccctaggcggctacaacgtccatcgcggtataatacccagaaagctccgaccaaccttctaccgctccgtcgcaaagtgccatgttcattccccccgcgctatcaagcctatataggctcacctcgatagtcagctgcttacctcatcctataggtccagttgacttcgttacgactcccaaaaattgggacgattgtccgaaaccgcgacggtaggtacgagtgcggtcccttaccgggaatcggcggtccattcgatacagcaaccgaattcttcgaggcgtgggccgacagcgtcgagtttaagtgggataaagagacaatcacaagtatgatgcagagaagtccgaaccctgcagaacggatgatcgcgattatcgagaatttcccgttacaaatcaaagctatggctagccggctatcctcgtgtaacgaagggccattccctctagaccatgatgacttttttcatagtaacatcatggtggatgagagcttcgatgtgacgggaatcatcgactgggaaggcgcatgtacggttccctatgagcttattgcgttccccgacttccttacagccatgcctgtctccttcgacctgccccagaaatacgatgaagatgggcagccgttcgatgaggaaattcgagaaatgtggcgcgagcgagaagggtatatcgaaatggtcagattagccgagcttgacgacagtgtgctttcggattgcctcagcagcaagaggagccaggctatagcttatttgtatggggcgtatactagtgttggaaagctgggcttttatgatcaagccgtgaaagagatagagaggggagaataaaactcagcagttcccctatcctggaatgataaaacgaagctcttcgtagagttattgggcggtggaacagcatcaaagaagcaatttcctgactcgaccgtactttcgggtgggatactccttggacgagccacattgagagatcctctgcttggtaaaagactctgggcctggaatagaaggtgaatgttaggcgcgaccatgcagtgtccgatcaagtatccaagtccggcggagtctaaaccctttgtggaatagccatgttttgtaaaccgccaagacccttctcttcttgaccttccactcatcactttctaggatatgctggacaatgccggaactggcgcgggcaatccctcgctcatggacctcgacgttgaaactgcctaaatcctcattccctccacgcgtatcgcctatcgatcggacgaaatacctaaaacgatgcaccgatgatctctacgcctggcaacgccgcgaaaggcccgccgaccaaccattcgtcttgcatgatggcccaccatatgcgaatggcgatctccatgttggacatgcgctcaacaagattttgaaggatattatctgtcgcgtacaattaggtcgcgggaagagggtgcggtacgtgccgggctgggactgccatggactgccgatcgagctcaaagcgctccaaggcctgcaccctgaggacattgcaagcggatcagtcagcgcagcggatattcgcacgtccgcgcgtaaattggcaagacaagccgtgaaagaacaaatgaaagggttccgtggcttcgcggtcatggccgactgggagaaccactggaagaccatggacaaacaattcgagatgcggcaactgggtatcttccgggaaatggtggaccgtggcctcatctaccgaaagttcaagccagtttactggtcgccttcaacgggtaccgctcttgcggaagcagaactggaatacaaggaggatcacatctcgaccgccgccttagtcaaattccctcttatcgatatccctacttgtctctctgagaatcctcttcttcgtggaaagaatttgaatgctgtgatttggaccactaccccttggacgctgcctgccaatgctgccattacaatcagcgagtctttggaatacgctattgtcttatcggaaaaacatggtcatcttctgatcgctcaatcacggttagagtacatccagaatatgctgaaagaagaactctctgtcattgtaccgtctatcatggggtccgagctggcagagcgaactacctatcgacctctattcaaaggacccgaagctcagccgcagcccatcttcgccgcggactttgttactgctgattctggctctggcctggttcatagcgcgcctggtcacggaatggaagactacgaagcatgtcttgcgcgtggcattcctgtgttcgctcccgtcaacgatgagggcaaatacacagataaagctatgcccctcgatcctacacgtttaactggaaaatctgtcttgggagaaggtaacaccgctgttttggaatgggtcgaatcgtgtggtcagttgcttgcccaacataagtacgagcacaagtatccttacgactggcgttcaaaacttccggtcattattcgggccactgagcagtggtttgccgatgtggccgatatccgtggcgatgctcttcgcgccttggaagatgtccgcttcgttcccgagactggaaagcaacggctcgaagcctttgtgaaaaaccggagtgaatggtgtatctcgcgacagcgtgcgtggggtgttccgattcctgcaatctatcaccgaaccactggagaggccgtcttgactaaagatagtatttcacatatcatgaccacaattgaagagcgcggaatcgatgcttggtggaccgatgctgcggatgaggctgcatggattcctccgtccttgcgggacgaggctggagcggggtatcgacgtggaatggacaccatggacgtttggtttgacagtggtaccagctgggcagagatcgatgttcctatcgaaggacggagtcatccagccgacgtgtatcttgaaggtaccgatcagcaccgtggttggttccagtcctctcttctcacatatatctcgcaccagctcggctcgggtcaattcacgacgcctcgtgcgccatacaagaacctcatcacgcacggtttcaccctggatgaacatgggcggaagatgagcaagtctattggcaacgtaatccacccgcagaccatcatggatggaactttgctgcctcccctcaaaccccgcaaaggcaaaggaaagaagcaacccgagaaccaagaaccgatgtacgacgctcttggccccgatgcgcttcgcatgtgggcagcgagcagcgactacacgcgcgacgtggtaattggaaaacgagtactccagaccgtcaataccagtctccacaagttccgtgtcactttcaaactgctgctgggtgcccttgccgatttcagtccagcgaacgttgtcccatatgaacagctgcagctggtcgatcgaattgcactcaagcacctctcggatatggtactcacgtcacagaagacaagtgataacttcgagttctacaagggcgtgagtacgatgaaccggtgggccaacctcgagttttctgctttctacatggaggcgatcaaggatcgcctctacacccttggtgaggacagcacgagtcgccgggctgcgcaaacgaccttattctacatctacaattatcttcaagaggccctggctcccatcacaccagtgcttgtggaagaaacatgggaacatactcccgagtctatccgcaccgagtctgagcacccactgcagcgtatcgtctccgcccccgctccggagtggcaggatttgaccctggacaccagctaccaagagctgacggtggttcactctgccattaagaacttgcaggagcaggcccgtagtaaaaagcagcttggctcctccctgcaatcctttgttcacattgtgctccccagcagctctggattattccagcagtatctgtcggagctccctgatctctttgtcgtgtcttccatcaccctgtcatcccacgatgaagctattccgaccgacattaaggacgccgaatggcaatatgaggagacatttgagctaggtgaccagccaggcaaagtgtatgtgtacgcgccacaggcctccaagtgcccacggtgttggcggtacgccattccggacccggtggcgatcgaagatgcgatttgcaaccggtgtgagacagtgatacatgaggcaaacgcctagagaactgtacaaaatatgtatacttatttctatgtattatagctagctgtaggtgattggacagagcagccaatttaccaactgcagtgcaaccagtaatccaaaacatccgacattcacattgaaaactagactgaaagaaagagtccatgtaattaatgtattcaatctatttgtccatccagtgaatgttctaaatggctatgacgacagtatccagtcaatgacggtcgccccaatcatccccaaatcctgctttgatgcaacatcatgtcatctatatagtcttgctcttctcgtttcttcttcttcctctactcaacttcctaaattcatcatgattcaacctccatttgatcagtttgctactctaacggcgcccgccaccacgtcctcggtggcgcctattcccactatcattccggggtatgaggtctaccaggaacttcatgatacaggcaagcgaactctttggtatgtatatattatactatgtattcaaatgtttaattatcctaacatttatagggttgtcactgtgttgatgggcgtttcctcgctggtgttctatactttggccgctcgtgctcctctagtgagttcatctcttctatatcatatatgctctcttctattattcatacctatctaacatatgtccagtctaaacgaatctttcatatcctcacctccctgataaccacaatttccttcgtgatctacctagctctttcaacaggccagggcataataaccaaacacgacagagtccacgaatcccacaaacatgtcccggacacccacacagactacgctcgccagatcctatggctgcgctttgttaactgggccatcaccacacccctgctcttcatcaacctcgcccttctatccggcctaccaggcgcaaacctactcatcgccattgtcgcccacctgatcatgcttacaacagctgtattcggcatattttcaggacacggccgcgagcgctgggtctggctgaccctcacatgtatatcttacctggtcgtgatccaccacattggcttccacgcacagcgagcggcgaagagcaaggatatccagacaagacggttctttgggtctgtttctgggtctgcaattgccatgttggcacttttcccaatgtgagtgatatatccaaaagagcactcttgagttcaaaccgatgctaatgttgggtagttccctcgcggctggtgctctcgcgctcagactgagtgttgacacggagactatccttttcgctatccaggatgtcttcacgcaaggtatccttggatactggcttctgttcactcatgagagttcgcctggaatgtaagtctcaagctgaatctcggtatgacgacatgctaattactgcagtgcactctacatggaaggattctggtcgcatggtgtcggcaatgagggagctattcgtatctccgatgaagagggtgcgtaaggaaataactccacacattcagactaggattctggtgataggatatttgttctctcttttttttttttttttcagttgacatttctctcacttacgagtcaatttggtttaaggcgttaggattgaaaatgagtatcaggatgtttactttgacttgaccctactatttcatatgtctgttctacttattgcgtactcttttaaataagaagcagaataacttaaaaatatttgctttttttggggggttttctaaattgtctttcttgcgtagttgaatgatatttccctggcggcacactcactagagccccctagggaaggctctagcgagcgtgccgccgcccatgaacacggaccccgtccgtttagaacacccccaggcctcgcaccgcggaagagagctcggcaagctcctcgtcactgagctcctcgacggagttctccccggagggcccgtcttcgccccgggccactccaaactcgcccgcctgacgaactcggacgtttcgctggaagcgagggagccagaaaccgcagtcgatgcagtccttcttgaagtgaacctccttgaggttccggaaccacatgccaaaggggtccccgtccaccgcgaagccgctcaaggtgagatgctcgacgggcaggtaggtggggacggggaacccagtggcaagggcaaggacctttgccttctcgatgcagtacttgtcgaggtactcgccatacccgaccttggggctgacctccccgtcgccttggccactaaagtcaatcaggttagcatatgtcacgtctcttggtatcacattactctcagttgggcacaacttactagtatacgggtgaggcatgcgacttcacattcatcacccagcccttcttgatgggctcccagccacttggtcccaccggctccacaatctccaagccaacagccatgtgcagctcgagagtggtgagatgagggttcaaccaaaccgtcttccagatggcaggctggtaagacttcatcataccaaacagcttcagcacacgcaagttgcggaactcggtcaagggccggacctggtccatggtgagaacgctgactttgatcttgtcctttaggttctcgaagaagcggtcgtcgtcgatggtattgtccttcaaggcctcgttgatgatactgctaattgtttcatcctccttgggagcagcgacttcaatgacttcttggtcggggtaacgaggcgcgtcacagatggaaagatcttgcatcccgaactcattggcattgtacaggtcccaatcgtggacagcggccttgcctttcgcgttcttgttgttggtcgggctttcggcctcagagctctcgaaatcgaacattgtcatcgaggagtcaattgccaagttgccatcggtggtctgattttcgatagcacaatcagtgttgaccccagcctgctcagtggtgactggcctggcagcagacttcaaggtgggagcattgtccccagcggtagcaacacccgtcagaatatcatcagactgggtggccttgtcagcaggcaggctgtcgatggcagaacccttgatgtcgggctcagtcatggtggcattgtcgatcatggtggtggttttgacaggacattcgacgtcgaagtcggtcatggtgcccttgtcgaccatggtgacctcatcagtcatagcaccttcatcaagaatttggtcatcgtcgagatcaacaatgctctcaggggagaccttgcgaacatcgaaaagcatgttcagttctaggaccaacttggtgcgagggatatcatcccaagtgccaccatcattgaggtgagccatcaagtggacgaaagaactggtatctgggtgaggaggagccatagtctcaggttgaggatcactctgttgctcaagccagtcttgaaagctgagaatgctgagatggttgggggccactgggtcgcaaggataagagtcttcagaggcggtgggaggtgcaatgtcgatgttggtagcagagggtcctctgtagagagaacggaaaatgggacgtggagcaggagggagtgggggaagagaatattcaggagggaagaaagttgtaggggacaagatggaaggacgtgtcggtgtgggcttctggagttcaacaaaaccctcagtggacgcgacgatgggacctcggtgtctgagactcagactcttaaaggaaggaaggcgccaactaccctttttggaactcttcagactctttgtgggactcttctcaggtgagttggtggtatcagttcctgcagaggagtgaaggaatcgaaggttattgaaagaagcaagtcgagagagtgggaaaagactcttcctcttcgttgggctctttccagaagagcttgtgactgtcgtctgaacagggtccttagcaggcgactgagcaggtgactgaacagggcttagatggggcggtagggctaaatggtgacgggagcattagcacgaactatagcaacgtatagcaaccagcatgcttgcatgtaaggcattcaatgtagcaatgctacgatgatgcagcacatgtaagaacgtgtaagaacataccttttctttcacctgcagtaagctgctcaacatgttttgttgcatcttcccagaaacggacacctaggaggctgttctcccattgatcacgcatatcacgatcatacatgctatccatgatgaattctggattaacaacaatgaaatttggatgaaagcaagtatctgaaggataggaaggatgggagaaggatgagaggaaggggaaaaggatggggaaaaggtacttcgcatgggtgctcttcaagcgtgcgctccccgcgttaacaatcactgggcttaggtaccatttgcgcgagtaaagccttcgctgagatcgaggtcgagggctccggatcaactctacacgttcagttaaaacagtcctcattatcacactacacgtcttcttcataggatgtggttcaacaattcctgacttatcctctataaaggctaaaaatatagcacagcttcactggttctgtcttctgtcttctaaagtacgttcaaggaagacaaggatatcctcaatggctcattcgagttggagaatacccaggcgtctctgtagttgccagttagagtataaaagcttcgttcgtctctaatagtctggatgcaatttactatcctggtagcaattgtagctatacaagaagttgcttctttgtgttcatttaccttaagatgttcgacactaacaatctagttatggcgtgatatttattgtaaataacaggtaaacattctcctgttgatatcactggcaataaaactatccggggcgatacctgtttttaaaaggtgcaatgcttcaatgcgtcaatagtacatactcgccgatcttggtcttttaggtttaggctagtgacggcccgcgacggacacccgccggtccactacctgaggacctaaggctccgatgtcctagtaacatcctatatggccttctagattcattggaactagtctagtcccgatggtcttctggtcaattaatccggtgcgttaagaaatgttgccgaggtccattctgcaattatcagcggaagggcgaggtccactcagacagacaacgctggcagagaagagaagggtggtgttgagaaatggtccgatactaagaaatcattggctttgtaactgatggtgtataggattcttctatttgatgaaccctttcttggccttctccagacgaccgagacatgcgagcatccgtcacacgtcgctgatattcttgagactgttggaagacagcatgatggtttttttactgtcaattacattcgccttcgctttgttgttcaaaagacagagcggcaccactattgcttcaggaaattccaatttttagatatgatttatgatatttcttgcttcaatcgacttgtgaagccccgaggagaatgtatgaggataaaaggaatatactgcgtattccgataaacgaacagctgcctcttccaaggagcagctggcgacgttcacggtggcaaggccacgacgtggctgcttttaccgcgcaacctacccctgtccggtaaaaggtatagtagtagctaatggcgccgagcgagcgatcgaagtacaaacacacgacttatttacattacaggctactgaaggtgcgggagcatactcgctccattctattctctatctcaagtgataaaggtggcattgctcgggtccaccgggtctatgtcggaaagcccttacaatccagaaggattgggaaacaaggtcaagagacatgatgtaactcctgagatgaaacaaaaccagaggaagatgaaggaatcgcgtaagaagctaaacctatttggcttacagcctaatttggtgacccaccagtatatgcctccagggatgtgagaaacatatacatgtaccggataatgcctggcactcgagaccttcccctttccgttttagtgttcactgggtgagcggcctgagtaagctacatcaataaaatgcgacatgcttgccccgtcacgtgcaactcttcccatttagaagtaggttgtcgatctgccagcctgagcctaataaaataaactactaggtggatatctgtgaaaaagcaagctttgattccaactttctaacaatacatgtagcgataatgctcaggcccccagaaagacatggcggcagcacgcagcaagatcctcggccgtgaatgtgtgctcaggctcccagaaagacatggcggcagcatgcagcaagatcctcggccgtgaatgtgatatttccttcccccgtgttaggggtcggcaggcggcgcataacggattcgaaatccaagtgtagaggggcattctggacattgtttgaggtaataacgacctcattgaccgctgaatgacgtagcaccattggggagtctgtttgagatagcagagtgcgctgggcctccgcctgtagtccacgggtgaatctgggagtggttggtatcagactgtattgttttatggtgagtctgcgctcgggcgatctttggatgtggaagagaataaccatgttgactttgtagtcggaatttgagaaccaccaatatgcgtcggctcgtagttgggcttctgattcagaaagaccagtttcaataacgagcgaaggccagttattattgtcaaaaggatttcctgacggagtaagacactcgtcggcttctttatcgcatgttcttccgtgatatcgggtagccgagttcatagtgtaatcatccgaatcaattcccatttcgaataattttaggacgagtttgtttgaaaatgatcgcgtcactcgctcatgagctcctgatggtatgattcgaatgaccccttgctggtgctgtgtcgagtgtcaatctgtagggaacctcaagagggtttcgatctccagctattagctcctgcacttgctgggatatgtttgacacgatgataaactggttcgagtaagacgtgttggtgttgatttgatgatagacatcgttcgcagtttctcgaagggtagaaatggaaggagcagacaacaccacagcacccgggatctcgaatggcaggtgcgaataacagacacctgcttcctcgaccttgacctgcgaggttcgaggcgcaacatctgactcggtcctatcgagggacttcgagtcgacgtcctttgcagctaaggaggaggaaactgtggataatagcggagacagcatattggcgaaataggggtgtatagcgaaaggaagatgaggcagaagaagagaagtgagaaggctattaacaaagggggactggtagtgtcatcgttacattgaataccggtctttttaccggacacttatgtgacctaaaagtatgcattttgcttatcaatctgcgtacaaattgtgtaaattttgcttagagaatttactgctattgatttttacccgtacgctcgtcatacctggatttctgtcaagtagtacctatatatatcttagatgtactatcatgtggagacctttacttcaatctaaagatacaacatactccaatactacataacttaataccgatagtatcccttagccagtgtcagatagacagcctggaccccagagtagtgtttgtttgcacataaaagctgcctgggcgacctctctgtacgtctcatagcgacattgttaggctgcatgtcgaaaatttagacttgaactagaagttagttcacccaaaatcaatgtctgtcaggtaaaaacaactactgccctactacaaaattactgctcaaagatcaatctggctggcaaatggcccgtggacttcgctattttgtgtccctccccaagataaatacatccagagcggtgcggagatgtctctcgcacacacgaaccatcttttaatcaccaagcagagggggaagttttaaaagaaacccattgaaattgtcgaacaaaaatcatgcatcatccataacctagtacttcttgccctggcggaggacatcaccgaactcctccagagggctgcggatgagcttattctcggcccacaggttgggggtaaggaaaccgtaggtgttgacgacagcgacgaaggtggccttgagggtgttctcgagggtcttggtggagccggaagaggaggtgtaagcgtcctggacaccggcgagctggagcaaacgcttgacagcaggggaagcgacaaggccggtaccgcggggggcgggaatgagctgcagtcaattagaaaccatctcttcagatgtccggccccaaaaaggactagatcagatataaaccaccgtaggaaacttacacggacggagacggaaccacactttccactctgcttgacgggcagagagtggggctcaccaaggttggtaccccagtaaccgcgacggacggggaggacagcgagcttggcgatggtgatagcagcacggatggcggtagcgacttccttggaggtcttgattccgagaccgatgtggccctcggagtcaccgatgaggacaatggccttgaaacgggtacgctgaccggcacgggtctgcttctggacgggcttgatctgtaggttgaaattcacgttagtttctggactgatttcgatgtattcgttttccgtttgagctttcattgcgcaattgcgggcaattgtcgcattccagtcgagtcccgctcaatcctccaatttcaaaaagggtgtgtcgatccgtaccttcataacctcatccttgagcttgggcaggaagaagtcgacaatctggtactccttgacgggcagagagtggaggtagatctgctccatggaggtgatcttgccggccttgacgagacggccgagcttggtgacgggctgccactccttctcctcctgcttggggccacgacggccgcgacggccaccacggccacgtccacgctcaccaccacggtcgccgcgcgaaccgaaaccaccacgtccacggggagcagcgtcagccatattgatgttgttatgggaagcgacggggagggttgtcgggattgagttggtcgtcgagtttcacggcgctgagcactgtttgcccgaaatttgcgcgggtgggctaagcgagcgggcagccctagtggggaccctatgccctaaactcccgatcgggaatgtggcacgtgcacttaaggtttccagggcggtgtcacctgatggggcccagaagtaaatggattgatcgccgttgttgtagagaggcattgatcatgtagaatgagggatagatttgcttatggtgatgttgaggtcattagctatagaaatatttacaaatatatcgtgtttttcataccaatcgagtcccgcaatgttgttattctcactgctacgtcacaaaatttggtgcaggcggatgcatttcctatttgggcaatgcgacagggactccgcaatttcaagattgttcccccagttgcccccagttcaatagtatttcagcgtctttcgtctgctttttgttctttctttgcatccttctctgcttgttttgtcccttatagccatccaatcgcagttatgctacgctggtaagtctctcttactcatctccttcaatcgcagctcataacattcaaccaggtaccagtctaagttggcaaagcggcctatcctcaccgcaagcatcaccagtgctgtatgattctctcctttctcctttctctggaccagttcctgactcttgttacaacagttcctattcggtagcggggatgttctagcccagcaagctgttgaccgaaaaggtctccaagagcacgacttcgctcgtactgggcgaatggctctatacggtggaggtatgtctatatgtctcaagtgccttgtacattgctgatccgtgtcttttcagctgtcttcggtccggttgccactacctggtttggcatcctccagcgtcatgtcgttctcaaaggcactgcgtccaccaccgccgctcgtgttgccgccgaccaagtcttctttgcccccacccagctcacatgtttcctatcctcgatggctatcatggaaggcgctgatcctgtggaaaggttgaagactgcctttgttcccgcctacaaggccaacctgatggtctggccatttgtacagggcgtcaacttcacatttattccgctagagctgcgcttgctctttgtcaacgttgtcagtttgggtgagtaatttgcttcgaggtgttgctgattatgctcctggctgcagtcactaacaactaaacagggtggaactgcttccttagcttgatgaacagcggggaggaattataattccgaggcataatttgagatacccttgatgtttttattgtcggctttctgcttttcacgtcggcgctccaatacgaaggatttttggttgggttattcggtctttgggcatcgtgttccggaattttattcttcaattttcggccatgtagaatcctggacagtataaatgagaataaaaatattcaaatgaataagaaatgaatcaaaatgatttgaagacaaaataagagcaaagtgaagatcggataactagttgggtgtgatagtgattatgttacggaagaacccaaagaggcaaggcaagtttttgtggctcgaacttcaaaacttccactctttgcagtcaattgtcgcccacctccactctcatctcacactgcctggagcagactattactgctaaatagatctaggcttggattcctgttaccttctttgtgtgaaaagctctgatttgcgctttccttaaaattctcgcccctccgactttccgaactcgatcgtcttcccctccacatccattcaccatggctgccgtcgcagaaaacggtactcccgctgtggccgatgagaactccgcccctgtcaccgagactcagactggtgatgccgttaccgtcttccacaaccccgatgacttcaacgtgaagcaccctcttatgcacgaatggactctgtggttcaccaagccccccagtggcaaagtaggagacaccagtgggatagatcgacgtcagcatgcttaccaatggaacctagggcgacaactggaacgacctgctcaaggaggtggtcactttcagctccgttgaagaattctggggcatctatgtatgtccaaccggacgtctccctcgatcgacaataacactaacctcgagcgctattagaacaacatcacgccgacctccgaactcggcctcaaggccgattaccacctcttcaagaagggcgtacggcccgagtgggaggacccccaaaacaagcacggtggaaagtggtcataccagttcaaggacaagcgctccgttcctattgacgaactctggctgcacgcgcagctggccgcgatcggcgagaccctcgagaatgacgatgacaacgaagtgatgggagtagttgtgaatgtgcgcaagggcttctaccgtgtcggtctatggacacgcacagtcggcaagagtatccagggagacaagcacacccgcacacaggcgcagggcaaggagattctcgaagcaattggccagcggttcaaggacgtgctgcggctcaacttggcggatgtggtggagttctccggccacactgacagtgcacacagcggcagcacgcgcgcgaaggccaagtacaccgtttaagagggctggctgagacggtgttgtgcagacgaggatgaaaaacgaaaaacaggggacggatggcgatgcgcagatttcacgattacggacgacacgaatcgaggggaattgactcgactcgatgtgcggtgccggaaactggggatgattcacatagggaccgaggtaccccccctttatgccggccccgctgcatagttctgcagggacgaactgattgcttgcgacttgtatcttactctaccaaacacattttacgaggcttatgccatgattaaggtcgaggtcgtgccagtatgatggtattttccctacattattctatacaaatatgacctgttcatggatgcattcaacttttggtgttgcgtgctaggtcgggtttcgcgagatcaagcccttgagtagagctgctgcttttggatggcacatgctgagaggtctatatcagtagatgtagctagaggtgtttgaccctcgtcgcatacgtctgtttcttgtctcttctgaccagtgtcgcgagtagaaggtcttttagggcttctaatggaacttcttggaatgcatggccaaagacactttagtactatgttgtatgctgcaggggtgctcaggggtgcagggcttcgaccatgttctgcggatttacaccgcatttacacgatcctctcgcaggacactgttgaaggactcatacactagcacacgaatattttctcattaatatcctcatcatgattagaccagaagacaggttttactcaggggaagttatttggcagacgggtgggcgtttgagacaggttgcactggaaaagggacaatattgttttcaatggcaaaggccaccccaaagtaggctgttgaagaaggccaaagattgcgtgcagtgaaagattgctcgggcagcttgaactaaaaccaaccatttgtcagatagcagaacatagtcacaaagcagaacacaaggcagaacacattatatctttgtgtaaatctcatacttatctaaaaatttgtcacccaacatccaagtcttttttgagtgacgaggctgtatacttgtgacattcaagacaggcaattggctctctatagggattataggtatatctcgctataggttgttaccctctcaagaggttatctaccaaacgctgggaggtattataggcaatgaataacaatggtagcaaagagaaggaggggagatggacgattggtctttgagagtgtggagtagataaatcatcagactaatatactggacgagcttgatatctactttccgaaccatctgggataacaagaccctcctgcgaaagaaaggtgaactgtcatgggatcgcatctccgggatcgaaaagtgtctcgacccctggctgataaaccatgaaggtttactggctaagacaactaacctcgtagactgttactacttcgacaacctatatggctagttggagagggctgaagctctctaaacaactggacagaagtcgtcatcgtcttatgcgaccgagacgttgccagcgcaactagctaactagctagacctcgatcattgtagagaatctatccttcttcatctctctcacttgttccaagaagattcaacaacccatgaatgcgcaaaattgatgaatctaccagaatcgcattacccactccttatgggagcggaaggacctgcctagaagggacagaacatcatacaacaaacgagaagggcaatcggcccatgcagaaaaccagaaaggtcccgcacccatcagaccagggtgttcaggaaatccacggaatcagcatcctcatcatcactgctttcggcgtcggtgtcgttagacggagcccaccagccgagagcgatcatcccggcacgcatacaccaatagtcgtcatccacacgacgacgcacagaccgaagccgctcgaagatatctagtacacactcctcatcgttcagtttgtacaccatgggccagtcgagaggagtctggtatatcgaagcgtcatactctggtccagaaagaggctttgcccactctgcagaaggaggaatcggaacctcttctccacttgccgacttcttcggccttttcgacggcttgcctgccgccacgggagtcgcaggagccgcacgtttcttcacggattcccgaggcgtctcgggaaggtgctcttcgccgtcgtcaggatgagcatcgctattatcgctatcgccagaaggagcaacagctcgctccttgcccttgcgacaaatctggtcttcggcaccaccctcttgtatctggacgcttaatagctctgctggatctggcgtagcctctgctggatctgacgtagcctctgctggatctggcgtagcctctgctggatctagcgtaacgataaagctgaggttcccacttgtcgttaattgctggcagtacacaggttgaccgttcgggtttattgatgagtcttcttcccgcttgattcttggccttccgctggcagcggcagcgatagagacgtgataaacctgcctgcgatgtttttgcatcgtttttacgctgcgacacgtaaattgacagttttcgacttgacagcagttaccacggtagaccggtaatccggggatcggccgggagtcaggggatggcgggacaaaaggattggtattgaagttccttccaaccttgactgcttcagcacaaattgccgtccgctgtgccaatgtacgggcagaagggtgttgtcggtgcttattggctagatggccgacaatggttttagcatccacggcagattcacaggtcttgcagattcagaactgataagtggggttataggtaaagaattccccaattaagttcatggtgatagtgcgactgtacgagtgaagaaaggagtaatattagactgaagaatagtaagatgcggttatctcgcgacacaacgcgacgcggataggtgaatacagaatatctatagactatagtagtaggtgaatactatctttattagctagtaaggcttagaagttagctctggtattattagccaagaaacgtacagaatacctgttgaaatgaccgaaccgtttgttacgagccaattcgattcagaagaaaagaaggtacaaggacatagtcgttccttcctcgtttggcaagtacaaagacgtgaccgttcctgcctcgtttggtaagtacgatccttcccagatcgtcacaccgttaacgactgagtgaactgggcatcgggccgaggatctacatgcgggattagggtgcatttgcaaaaggaatccatagtagtagggggaattgtaactagaatggcctcacgattgagagtctggagtatgggatatgtcctggctcagtatccggggccgaagaagagacaaaaagtgccttcaaagttatgttggggaaaataactgactattcagattgtggtgtatcccgtatcttagaatctaatatatggctgtggatccagactagggattgacctcatgtcatggagatggatgttctatccattaacactataaatccctgttactatcagccagttaaggacagtgaaatggtaaacatgctagtaagttgcctgttttgtttccttccttatccgaacttacagtagagtcgaacaccagggcagagaacgcgtctcattgctagcagaatatcacctcgtataggctagccaataggaaaaagttatttatagaggtaagcaagctgcttccgaaaaatccatgatcagcacaatgttctttattgatacatttccttgcaagttcctgctgggaatagtagaatcccctagcaggaatacccagaaacagtactccgtacctcaagatacaaccttcatatttcttcgattcatggatattctcaacacaaatatagttcgcctgaggtcagcactatatggatacaatccagcaagtcatggagatccactgagatgctctgagtggctggtggtgtcgcaatatcaaagttcccggagtaggtcctccgtactccgtagagccctggtcttggtcgagggccgacatcgcaagttgtcgggttgttctcatattggctcaacggcatagagtagtggtctaagatagttcgattggaaggtcgcaacggtatcagatagggcgtggaggattgcgataaagcgctttggcgacttgggcttggcaagtaagcgtgcgccactgggagagcacgcaactcaaccctgtcgagtggccatccagacgatataaatgtctagacgatcaactcgagcaaccgcataggatctttcgagactgagtttaacagaatttataaagtcattcgggacgccggcgattttgacgtgatataatcctgtgccggtgtcgggattgccaataggttgggtcttagtggaactctctcttaaggcgttggtcgcttggcgaacggctagaatcccccagggattgggaaataatgccgaatggtcgtgataagccctcctgttggtggatatgaagctcatctttgtccgcaagcgaagtcggagcccaaagagcatgtgctataactcttggtgttttcttggtgttatattatgagcgatgtcccagttgtggtctttgactctctctctctctcttttctcttttccttcctttccctccaaaaaaatgtccatatgatgagatgacctctattcctccaaggaagaccacacatgcgaatgaccaacactaactgaaatcttcccccttatctgctgaggtcttggcaagtcaccgggcacaaaccacagatccaccatcgttcaatgtttctacgcaactcttacgagagaataattaccccggaaaacagagaccagaccagaccagaccgaatgataggaacggcgggttctggtttctctcatcgcttggaatgtattcaacggcattggctattgctgtcttgacggggaaacgcatgccggggtaagcgggtatgaagctttgagacatacgaaactccacgggaagggggaaaagggccccaacgttacattggcaatcatctggtgattgtgattaatgcgatttattgatctcgcaatcaggaaatccgcgctcgacatcgcatatcccgaaagcggatgtgttttccggtcctgagtcgaaggcgctcaagccttgccaatatgcagcccatgcagcccatgcagttcaatattagcagtcgccatcggatttccaaatatatccttactgatttgtcgatttgatggcattgggaaggcgaaaacaaatcccagaatttgccctcgtggcaaatcccggaaccgtcctcaactgggaaattttcaacctcatcggcaatctccgactgcacatctcaacgtgattcgatgaaaaaaatacacaaagtggactcggcctcaccccttctagaaatccccaggatgccaaatgcaagaccagaccattcgctgctctgattgatccggacctgtatcaagagtccaccctatgctcggcctttaattgcttgactcgttcgtttccgtgtgcactgtctctgccgtgtggttacattcgcatgctcgtgggtcgacttgctcgagttcagccattcgccgtgggacgataaacatgccgatcgcatccacggtcgaactgcgaacaatggcccgtatgcgaccttctcggatgagccttagtggcatgggggcatgggggatggcgtgcaatttgctttttttcttctttttcctgcttttctcaagataagactctcctccggtcccacttggcctcatttgtcgagtgcacgaaaatttgcatatatagtattaatcacgccctttttttgtgcctctttctctactcccgattgtgattttttttctaggccctcttgaaagagaaggcatcatctggtctcgtagccatgtcgtccacagaccgtgagatggagacttctgcgtatgtatctgtgtggctggcaatttcatgaagggcaactaaccctctcttcagagctccaccctatgacaccgaagaggtcactcaccatgtcgtcctgaatgaaaaggctatggatgccgagttcgacaaggagaaccagactaccccggatggcggcgaacccacactctcggagaagatttccttgcgccatgtcgcagagaacctgcctctctccgcctggttggtggccgtcgtcgagctgtgcgagcgtttcacctactacggcatgtctggtctgttccagaactacgttcagcggcctcgggatggtagcgagggacgtggtgcgctcggtatggctcaccagggtgcaaccggtctcactaccttcttccagttctggtgttatgttaccccgatcgtcggtgccatcattgccgatcagtatcttggcaagtacaagaccattgtgctgttctgttttgtctacatgattggcctgctcatcctggtctgcacctccattcccactgccctggaccacggctcaggcatcggcggtttcattgtcgccatcttgatcattggtctgggtaccggtggcatcaagagtaatgtggctcctttgattgcggatcagtacaagcgcaagaagatggctatcaccaccaccaagaagggtgagcgcgtcgtcattgaccccgccctgacaattcagcgtatctacatgatcttctacggatgcatcaacctcggttcgctgtccctgctcgctactccctacatggagttgtacatcgacttctggccagcctatcttctctgtctctgtatgttcatggtcggtaccctggtgatcattctcggccgcaagttctacgtcgttcgcccaccccagggctccatcatcacggatgctttccgtgccgtctggatgatgatgaagaaccgcaacatggatgcccccaagccctcctggcagaccgaacacaatggtgcgtcctctgtccactgggacgaccacttcatcgacgagctgaagcgcgccttggtcgcctgccgcgtgttcgccttctacccgatctactgggtcgtctacggacaattctccggcaacttcgtcacccaagccggtcaaatggatggccacggcattcccaacgatctgatgcagaacttcgaccccatctccatcatcgttttcattcccattctcgaaacctgcgtctaccccctgatgcgccgtttgaagatccccttccgcccgatcacccgtatcgcccttggcttcgtcgtcgcctcgcttgctatgatgtacgccgctatcgtgcagcacctgatctacgacgccggtccatgctacggcaaacctttgtgcgcggcctccgaggtcaacggagaagcccaaggcaaccgagttcacatcgccatccaaaccccggcctacgtcttcatcggtctgtctgagattttcgcctctgtctccggtctcgagtacgcatacaccaaagcaccgcccagcatgaagtccttcgtgcagtccatgtacctcctcacgaacgcgttcggctccgctctcgccgaagcactcactcccgccgcctacgatcccgccgtcatgtggatgttcaccggtcttgcctgtgcatcctgcatatgcggtatcatcttcttcgccgtgttccaccacctgaatgcgcaggaagacgacatgaacgccctcgatgctgaagaagagatgcccgaggctccggttgaggcggcacggggccagtccaaggccgagtaggcattggcagtgtattttttgtgatatatttgtatttttcttgtttctttggcattggcattggcagcattgcaagtgtctcttatctcttacgctgggatcgtactttttttttcattgcttgcatcatcggagcgggaccctctgtgtgttctaaaactgctgtgcagattgtgagacgtggtatgatatgatgcattaatttagtatatacttattaagaatgaaaataatcagtatacttatcaattcactccatcttcaccgtacttccaaactccatgttcgtgggacagacctccacaatgacgaatatgacagacacactacggagtacagactactccgtatagaagtggattcgactccatctctgtgatgatcttctccgctcctttctgcgacacgccgtttcaattatctttcaagggtctgctcgcactgttaaagtgatttgggtaagagcttatccaaaccacccaaatcggaagtcaaagctcatgccagagcggtttctctttagtttggatatgtgatgtttctcagtcaaaacaagacatcagatttgcaaggctggagtgaccctcgactttcattgctctcaaatcttgagcatttggacatactcacttttcggaacgtcttttttgaagttgatctaagcctcatatgcccacctttgcacaacgccagatgacaatggcctcgcattcctatcccttggccattggccgaattccgtggcttctcctaaaatgcaaagcattctagagcattcaagctcttccatatcgacggcagagatggttcagctttgaaacgaaggactaaagctgttagtaccaagctatatgacagaacattgagcctctttttcatgcttctcttagcctcccaacgtctggcctccagttcagattccaggaattattgtggtgtccccatcctgtatgtgtatcgaatccaccagatcgagacaatatgctagtttgtggcattgaagggattttaaacatccacaaggtaaccttggaatggaatggcttagacagatgtctaccgaggtagatccacatatgagacccacactccctgacttcagaggctcaactgcctcgggagcacagccctggcggtcaactgcctgaatacaacaaccattaggtgaactctgtggctaagaatacccgaggcttacatgccgcagatgcatgaggggcgagacctgggaatcgttcgattatcatggcagatatgtcgggtgacacctaagaaggatgatacggttattgtttgagtatagacaagattcaaaacactaacggttagtccggggtgaagaaagtgagtgttggggatgaaaaggggacggagagttcttaggccgaaagaagaatagaccgggttaccgcattgggcaacctcatagccactcctccgtacgatagcccttatacggagtaaccatatgctgtatagatcaggcagctatactttgactttgctaaatgagatttagttgatgcctgacatgaggctgatcgaaccttctaaatgccctgattggccaagtttcacatcgatttttcagttcgtcttgtccctacgcatgctatttccgacttgtcgcccagactggattgttttcctattggaatagtccgcgttgcatacatatgtctttcatcaaggcggtacatcataatcatgacgtgcagactcccttgccacagaccgtcggacatgtaccaggtacatcatccagggtggatattacaaccaacgccaagtatccagtacttgatgaaaaaatatgccgctctcccccttcatcgaatcacacggatctgccatgtcttaaatagaacaggctcagccacacaggatgaaaggccaatctcggggactccaccgccaaattgcaaggaggctgtatccgtactaacgtaggaacggtgcactgtccactctgtagcagacggttaaaaatagggggaccccaaagaaaccactgtaaatgcgaagacctatgaaacccttgaaaccgtcgaaccccgttaaacccattgatcccttttaattcaccccaaattaatgcttaattctgctattcagcgcgactaacccccggatcttattggctttgctgcgctgacaccgccagcccttctgccgtaatttccacttctccccgtctcacccttccctcctacatctcccccctccccctactattattgttttgttccccagatctgagaacctgagaatctgcacatcatgagtgtgagtgaaccaatgtgtaccccattgattgcttgagtttgctttctgacgcgacttcccctagtaccagagcttaggggacacctcaggcggctatggccagtacaacccatacggaagtcagcaacagaccaatccctatgggggccaggaacaacaaagctatggatatggtggtggttatgaccaggctggcgccgcggaacagggaaatggtggctacggtatgctgacccgataatcgacctcttcgcgacgagtctaattcctcaacagagatgtccaacatcaatcaagcctcatctggtggcccaacggcgattctgaacaagtgcaaggaactgaacgagggtattaccgagttgaccaagaagcgcgagtcccaattggttgccgcccaaaaggcccttctggactcaagcaccggcaaggaagaccaggcttcgcgccaaacgctcgattacattgaggatgagatcaatacagcgttgcgatacctgcgcgatcaattcaagcgcatcaaggagaccccgggatccggcgatgcgcgcgtacagggccaggttgagaacgtcagccgcaacttgcgtcgggagattgagcagtaccagcgcacgcagagcgacttccagaagcgcctggaggagcaagtgcgccgccgatacgagattgccaatcccgaggctacccccgaggagttagaacagggtgtgcagaatgttctgctgggacaggagcagagttttgttgtatgtttcgcccgaattgaatcttttacgggtcgggtcggttgctaatatttgaggaataggttcccggtactcgcacccgccaggccaacgatgcccgtcaggctactatgcagcgctccgccgctatccgaaaaatcgagcaggatctgatcgaactcagccacctgtacaatgaggtcgcagagctggtacaccagcaggagcctgcagtccagcagattcagcaaggagccgaggagacacaccgcaatgtcgagcaggccaacaccaagcttgacagcgctattcagagcgcaaagaacgctcggcgctggaagtggtacgcgctgatcatcatccgtaagtattacctgtcaagaccaagatctgatcgacccgctaacctactttccagtcattattattggtatcgtcgtcggtgtggccgtcggtgtcaccgaaaacaacaagagcaagtagcgggaaatagtgatttgtctgctgcactgcatcattttcctaccttgtccatgtacgacctgtcccgggatcttctccgcatcttcccatttgtctttgttctctcgttataccaccccttcgcatttccttcttgtgtaaaagcaatgtctttcaacccctctttctttgtgtctttgcctcctagctgtctgtacctgcgtgttcgtgtacagctgctccgcgtctaacacgcgatggcccttgatgattgtcgttatttcggggctcgtgatgttgcggcgcatggatgtatatactagattgttgctttcctccgccccctgtttggcgctagaacctatgtaatactgtctaataattgattccttcgcgcatgagtttgatctatcacgccgtagatataaccccgtagttgaaaagtcctggaatcctgggtttgtgcagtgtaatgtaatgcattccgagtcatcgtttgggggtatccgactcgacacgctctttcgaaataacgagcacctgaacgcccaatcattccgcgatctacgccttttccttcctctccttttcgcgctgctcctcagcgggtgtcttcgtcttcaactgcagtgcatgtagtccgccctcgcgagccatctcttccttgaacaacgaatagaccatacggtgccgagcgggctgcatcttcgactcgaaggaatcagagacaattgtcacactgagagatattagacattgactcatacgccgtgtatggtcggatgtggggaacgaacttgaaatgcgtctctttcgataccgacccttccattgcagcgtggtgcgcatggaggtgagagtcattccggatcacgagtttcgaaggtgtgaatgcatgggtgatctataaaaagggggggagaagttagcaatcgcagtcaacaacagtcaacaacacggaggagtggctcaccttatcgcgcatgacatcctctagcggcgtattggaggccatccttgcagatacagcgaagagacggcgagggagcagacccggaaggctgcgaggaagcatttagaggaaaagaagaagtgatcaaagggaggaggatgagagagatgtccgcaattgaagccaatcaaatgttttcgatttcggaacgtcactgtcatgacatcagcttgtctttttgctcgagacatctcaattgcttcttcttattcaatgggtttctactattaaagttcaaaatttcaaatttcaaaatgtctggtttactttccctgctttcgcgtacgaatgcgcgcgtctgcttcaccccgcggcgaatgcctctcagcgccagactcttgtcgactcttcccaacacacatatcttccgcgcactccagagccatgaccctgaaagcctggccgtcgtgcatagcatctctgcccgatcattcacctacggtaatctaattgccgacaccgttctcgctaaggaggacctggaacaaaaggcccagggccaattggctggcgagcggatcgccttcatcgcggagagcagctatgattacgtcggtacttgctgccttgaatcccgttgaagaatatacgtagaatcctaataagcttacagtgatgatgctggcgatctttgctagtgatgccattgcgctcccgctctcgccggctttcccggttgcggagctgaagtatatcttggacaattcacaggctaagatgctgttgacaactcaaaaatatgccaataaaggcctggaagttgtggacaagggattggagcacgagcctgtgttctctatccgccgtaagctcacagagggcgcctcgagcagcgaagctgtaaccctacaagatttgaagcagccttcgtccggtgggttgatgttgtatacatctgggacaacgaaccgaccggtaagctcagttagttcctgcgcccaatgagctagctaactcggaacagaaaggtgtactcatcccccactcggcagtggccgcgcaggcatcttcactattagaagcatggaagtacacgtcggatgaccggctgcttcacttgcttcccctccaccacatccacggcgtggtaaacgcaatcgtggcgccaatagtagcaggctcctcggtcgagttcatgcaccccttcaatgcggaaaaagtctggaaacgactagcagcacccttcctcccatccaacagctcaagatcacccgtcacattcttaactgccgtcccaacaatctacacccgcctcatggccaccttcccggaactaaccccagagtaccaaaaagccgccaaagaaggaatctccccacaaaaccttcgcttgagtatctccggctcggccgccctaccaacaccgactaaagccgcctggacaaaactcagcaacggcaatgttctcctcgaacgattcggcatgaccgaaatcgggatggcgattagctgcggcctcgacgtcgcagaccgggtcgacggcagcgtcggctggccgctcccaggcgtcgaagcccgactcaccgacctcgaaacgggtgctgtcattccaatggaagacaagaattccaatggcccagaacgccaaggcgagatccagatccgcggtgaaacagtcttcgaccattactgggacaacgagaaagccacgcgcgagagtttcgttcagagcgatgatggaggccgaccgtggttctgcaccggcgatgtcgcgatccgtcgagttgttgacggagctggtagtggagcgagcggagattgggctcggggaccgatgtatttcatccaggggcggaagagtgttgatatcatcaagactgggggtgagaaggttagcgcgttggaggttgagagggagttgctttctctgtatgttgtcacattcctttcaggtgttcacttgaaagatctgtactaacgatggtgcttagtccccaaatcaccgaagctgcagttgttggtctcccatctgaacagtggggccagaagattgttgcggtggttgttctttctcccgacgcagctacttcgggtcataatggtcaaccctggggcccgctggatatgcggcgcgcgctaaaggattctcttgctcctttcaaaatcccgcatgagatgaaggttttggaagctattccgaggaatgcgatgggtaaggtcaataagaaggcactggtgaaagaggtgtttggtgcatgaaagtcgaacacactgtacaaattgagagcctacctaaacatatgtttgaggtaggtgatgtatatctacccggagaaaggatgtacaacgatctgcataatagaacattgaagatttaaatcatttgttatattggaaataaccgaaatcgcttgctcttaatcccaaattcatatcatcatatcaaggcctgtgcccggcaagataaaaaaccaaagagttccaaatatccacctagattctacggtgatcctcattctcaatgcgagtagcgctcgaatccacacgaggatcgagcttgttggcaatgctcgagctgtgaggaccagtggtaccagtggtagttccagtgctagaagtattgtagctactgccagcaacagcatcctgatgaccagtagtaccaagacccgatccaccaatcaccgagccaccgggagcggtagtatcgcgagtgtgggagccgtgggtaacagtaccaggcccagtaccagcaagaggagactggtgctgagggtagctgtcacggtccgagtcaacgcgggggtcgagcttgttcgcaatgttggaactgtggggtccagcatttgtgctgctagtgccaggggtaggaatcggaccactgtgggtagcgccagttccagagcccagggtagagccgtgggtgcctgtagcggtgctggggtgagtagacccaagaccagcaccagtgccggtcaaaccagtgccatggatagtgtcagtacccagggcagagccatgtgtgccggtagcggtggtagggtgggtagacccaagaccggcaccggtgctatgggtagtgccagatcccagggcagagccgtgagtgccagaagcagtggtagggtgagtagatccaagaccggcgccggttccagtcacaccagaagtgccatgggtagtgccagagcccagagtagaactgtgggtgccagtagcggtggtagggtgagtagatccaagaccagtgccggtgaggccctcgtggcgagcacggttatcacggtcagagtcgacccggggatcggccttgttcgcgatgtttgagctatgagggccggcattggtgctgcctgtggtattgtgggtagatccaagaccagcacctgtgccagtcacaccagaggtgccatgggtggtgccagagcccagggtcgagccgtgagtgcctgttgcggtggtgccgtgggttgtgccatgggttgttccaagaccagcgccagtcacatcggtatgggcagcacggttgtctgaggtagttattagtattgaattctgaaggatgagatgtcaggtgaggtgaatgacaaacctctatcactgtcgacgcgggggtcaagcttgttggccaagttggacgagtgaggtccatggttggaggactttgtcgactcgtgggactcgttcttcttgccagtaatggcctcttcagccttgcgtacaaactgcattttggtagtgatggtatttatgaaagttgaagttgattgaagttggttgaaggtgttatcaagtagatattaaatatggttgatgaaggtaagatatgaattgatctcattaggagaagaagagggtatttatatctcctttgtacatagacatactcaggcaaccattagagtaatgatttatgacgttcgtggtttcaatgtgatggtgtacaagcatcacgaatttaggtgcgacgatccacgatcctctatcggatacgatgtacatggatggatttcttatggagttcttattagctacatggtcagccacttaactcagtgtactgtcataagaatgttaaactggctatcatccttgatctaaacgccaaatatcaaaatccaaaacaattgcgtcatggttcaggctttgccaagaaatatgtatgccaactatatgcacctgggcagtacatatatgtacatacaattgtactcagcacatcctagtaatcctatagccaaccagaataaactggaatgatatcactgtggctaaagcatgtatttatcttgttcttatgtacaccgtagtctcatctttgttgtacgaccttgtactccggacttgtgatagggcgtggaagtcgaagcaaagaagacttgtaactttatttattcattattgaagtttgtagctagtggctcaattgacagatatgaaacatattcacaccgtactttctgtcaaagaatagtcgcagtggtgtagtcgcgtggctacgtcatcggaatttatgctaactagccacttcgggtatatctccgactagccgcaattctcaagagcttacttactgtcacctgatctatcactaactacaaaccaatttcaattaacgagaatggtagaatttcagtactcttttgactgtctttgtagatgttgtttcctcaatttaacaaaaaaagttagggaaaaacgacagatcaatagggtggaagattgaaattgcgaccagcggtggatatacccgaagtggctagttagcatagtccccggtcacatgactgggatatatggtctcttcatcagacaagtggcaataaccatgatattctgagaaaacgtccacgcgtccttcgtctgggatagtcgttcgacatggaatatgtgacacatgtctccttaatatcttaataccttaattcaggacctgcaaagacccaatcccgaagcccaacttagtgagattgaggaagcctacgacttggttattcggaccggtagtataaagctacactgatgagtgattcagtgggacctttttgagggtcagtcaagaagacctctagtcgttgatggcaaggttgcccaggtgctagacctcgctcttccaaggcccctgaaacaatcagttgagcgagataatcagggctgcagctctagtcattgcagtgcaaagtcaagatttatgggccttgctaggtgagatcacctctcaacgtagcatcgctgagaatatatcgacctagaatatttccaagcttcgccattcaacgattgcttaaatccctctagctgacgcattggtagaaccattgagaaaaattaccgaacaaatttccacagcttctggatgtacagtcgttgaaaacgcaagattacttcctgttcaatcgaaaatgaggttgaaaaaagctccgaatctgctgatgtcagcatccggtcgctccggtccgggtggacactccgagatataagctgttcgccatggagttacatacatggacagtctgaattcggtaattcggatctgtggggttgcatttctacgcccttggggatttgtactgccaggcgtagatccggcgttcccccccttgcttgcgatccttgaattttcacatgcgcgacaatttacatcgaaattgttcaaaggagtgtcccttgcaaacaatcataatacaagctcttcccagacaacacagtctttccgcctgaagatcccaccccacgggtcgcgtaacaagccatgtggattgtctcgttctggatattccccttggtatccgggtgcatgtggattggtgagagtcagaacacgagggaataagcttacctgaactaatggccttgtagctatgctggtagccatgttgtcaacctgggcggcggatggaaagccaatttattccaccatgaccgatgggctcaaaattccgtgagtctaatcaatgaaccttggccctcggcgcaacatcgaagttaattcaacaatcagttacatttcccatattggggctgagagactcaaaccgctgttcattgcgggaagtgcagtaacagtcgtattcatggatctcggtctcatctctgagcgttggcttcgtcatgccggccaacttgcccgaaacaaagggaggtttgacaagatctgtgctgttggatcgattcttttctcgatcgctggggctgtaggtctcattctgctgtccatattcgacaccaagcatcactcaaaccttcacgacgggtttttggctatgttcatagcatgctacgtggtctgcgccctcctggtatgtatggaatacatccaaatcggccgattctaccatccgcaagcccggattttgttagtgagctttttcatcaaagctcttttcatcatctgtgaagttgctgtcgctattggatttggcgtatgcaaaagagccggaagaaacaggaacgcagctgctgttttagaatggggtaagttttcagccctgtcagattgtgcaaggaaaagctaacttcagtagttgccgctcttatattcgcattctttgttttttctttcatcattgatctcctgccgtccgttcgtaccaagagacacgttccccagggtgaaaagtatactcggccggatgtggagaatcgaccagttgacttttaagtcgcgagtacagtctgacagcatataataattattccatagatactcgtggatgtcagaatggcttttgccaatgagagaccagttttgactttggccacatgtggtgatatcatccctggggaaagggtgaaaaccccgaatctctcgaaaaggaactctgaacacttcacactaattcaagcaatcaataaattaatacctgatcatcaacatgggcttcttcaaccacctctgtggtttaatctcaaccatcgctcatatcatccaatgcatcagttcatttgtcgtcctcgggatcacagcctgggcagcccgcgagacgaaaacccttacagtgatatttcccttggtggtggtatatttccccaaggtcttatcttaatatgtagagattctaaaatccttccaggcggtcctcaccccaatcctcgacggtataacactaggcatcagctgctttacccgacgtcgcagatggcaggttctccctctgcttctgacggacgcagcactttcttacctgtaagcatgatagtattaagcactcttttataccggtaacaaatgctctcccatttagctggctcactgcatttatctttctggctcaggatttcaaccaggtcagctgcagcatccacctttggaaccacgagatggtatgtagccggaagtatgcggccgaggcattcagtttcattgcattgtaagtgacgttcttttgacgatcaatccactcgctgatcgcacggcagctttactacattcggagctatgacatccgaggttttgtatgcatacctgccgaagaaagataccccaattcaggaaaggaaagatggggcgacgaacctggagcataatctccagggtgccggattaatgaacccttgaacagaaagtacctgtgaatgctgaataacgatgtccaaggcatgaaatccttcaattatataaagattggcgatgcctataggagatgtatatgatacagtattgtacaagtcacccaaactcaagcccactcacccttcctctcgaacggcttcacaaaactagtcgcctccatagtcacctgtagagaggccatatcgacagccgtgatatgagcttcgaccgtgcagaagatatccagcttatctttatctgggaaatccggagggatggtgacggagcagttcacgccaagactggtgatgacgccggaatactcctcgtccaaatgtctaggcctggtacgcggggtgcgtagcagacatgggaatgtgacggggagattgcactcggagaagtagaatgcacggaagaggagcatgcaagcccaatgttgtgcggagtatttgtcgaggtttctgagacgtgtgcgcaggggttgagagtagataaggtgagcgtcgatgtcagatttggagaaggggaggagagagatgggaatggtgtttgtgtcattggtggtgatttcagtaggagtctctgctagatcggcttttgctagatcggtctctgctgggtccgtctctgctaggtccgtctccactagatcgatctctgtagaatctggactatcaacaagagcgtcaaactgacggccgtgttcatgctcgaaacgcaatgctgcctcgatctggtaatgcgcaataacatccgtgtaccggcgcagcggactggtgctcttgacgtacgtatccaagcccagggtgtgatgcttagttgggactgtagaggagtaggccaacggtacgctgagctcatagaaaccctcaccgccgaaattggacaagtttttgttggtcacgcgtccgtactccgggtcgtaccacgtgccgtcgtagacaacggggatgttgcgtgcggcacagaattgaccggagatgtgcccggccaggttcatgatcagggagactagattgtcccgggattggtcgcgaacgtcgtatggatcataggattgcacatcgagccggatgactgggtcaccgagatagtggcgtccggttgtggattgtaaatcgtatggcggcatcggggcgtcgcctgactggactgagatagaaagatctgggctaagaggagtgaggtccatggcaccattctttcgacgggtctggcggaatgcgagcatgagttgacgcatgatgtggaatctatctttgtcctcgggccgcaggccttgttggatagttttaccctcaggtattgatggttcggtgaacttgccaccgatggtgaatgattccgactgttcttcagaatcggggtcgaagaagtcgcgcagtgttttgtgagtgatgttgatgacattgtgaattgtgccgtttttgatttcactatccaagatctctcctcgaagattcatcttcgcactgaatgtgagtaccggccgaccagctgccaaactgaagtggggttcagtgagagctttgggaagcatgggataggtgcgttccgggatgtaggtggtgaagagtcgagaagctgcatactgaatgatagggttgtcatttttaataaaggctgtcggattggcaacgtggacatgcacccagaaagtgttacgagatcctggcacgggctccagcgatataccgtcatcaatttcctgcgccgtcacatcatccacacagtaaactgggagatctccccaatcctttctcagatgttgcatggaatcctgcaactggtcggcagtgagcttgctgcaagattcctcaatctcttcccactccatgtcccttgcgagggatatcccatgtccaggaagcatcagatactggtcaaggggtaaaaggttctcccaaggcgctatgatgccgatctcctgcaataaaagacgggttgaagcctcactcagaccaagagtattatacatcccggtggcacgcatgatatgtgttgctgttgatctcagagtgcccgatggcatgacaatggaagggaccgagtacagctgcagatattcaatgatcatttggtcatctgcagtaaatttctcggtaggaagttctcggaacactagcgggtttccatcctgaccaggcgaatacctgttggaggatggtcccacgctggacataatagtcggagagcggagccttctgctaaggcgaatcaaccgctgtgctttagtgatgaaccggttcatagggtggtctttagatccctgcgtgtctttgcgcattgtggcacgaacacaatgttcttggtgttcatgagtccagtcaacgacctgtttgacaatattggcgatccgttttggctgcacgatatacatccggctgaacaaggagctgccatctttttcgatgagaaaaggatgccggcgaacagcttgatggacagcaaacatgttgacactagtcagctccgattcctcaatgccaagagcagttgttgtcaaattttcaaggctcaagcatagaacttcggtatcgtctgccaccttatcatgaagatcatccagtatctgggaattttctctatagaatttcaaaacatgagtcttgaagttgctcatcatcctcagaagaggagcgcccagtggccttggaagacctccctcgggggtcagttgaatatcttgacatgcgatagcctcgttatccgggaaccatggcgtgaggggctcgacaagttcggtaggtgcaaatcctttgataacatagtcgagctccgtgttggagcaaatgcgccaattcccgttgccattgtagaactgtttctgtttgtgaacagaccgcacgtagattccgtaattgaacaccccgtccgcgttcaaccgggcgattaaatcgccctgttcgaggtgttcaccttcaaattcatctttgtccatagcctcttggttaaacctgttcgggtcaccccaagcatcgattatgtctcggccgttaggcattgtgccaatcgatttaccaggtatttccaatggccgattcttggagtcggatcggcgcaccgggtccaaatcattggggttgctatcctgccatttcttcaggtactctcgaatgtctccatgtaattcgaattgggaccgaaggaggatattgccatcgataggaactcttgggggcggctcgtctggatcagctgttttctgctgggatagaagaaagattagcggtgaatagcaaaatcttctttagtatgacacacttcactactggttggaacagcctcagctgaccccaatgttctcgtggtggacgaaaagcgtcgccccccagacaacaccggaagatgagtggcggatgcgatcgacgcacattctacgcggttgtgtcgccatgtgcagagcacaggtgacaaatttgcaccagtcagcttctgcaaagcccttattcttgtaagtgccattgccagagcttgcgcataatgaatgcgccggtggctcgaaaactaagtatattatgccggcagttgctataccgccataggcggtatagaaattgtcccgtgattttggtcgaccaatcacattgcaacatagaagtatagaattctgtttataccaaagaagctcactggatgaatagtctcatagttagattatttagattgagttgtagctagtaagaacacatcgatatcaatcgatggcacgcattctctctaggccataaaatacaaactataatctcacagataggccatcgcatagacagtagctcccgaggacatctaatgagtacccttccttgtgtcttaaagtctgtggtagacattctgcccggttccaattcttgtcacaatgcaataatccacaaaaacaatgccaactagtagaatgctgtgggtatacctagtacatcttcaaaccactggtcatttcccaaatccattgactgcatccaggccatctgatctagatctggaatatggtgattgcgactagtcatgtcagagtcagcactttggcatggcctggtccccacatcttgtagctgagaagccatggtccatcgagcttcagcccacagccgacatttggtcaaaagcttaaataagagcttgagaaaatgatcattgcactgaagttccggctctttgctacttagatcgagcttatggagcatacagtccatcgttgatatcaggtcgactgtattccgcaccgcttggcaatcccattgtgggtcttcaagtgttgatagatatttcaaaagtgtgatactcagaatcatctgtgaccaaaagtgaaagggctggccgaaaagtttcgagcaaggaattctgtagaactcgtccaaccacgatttgatattctcgaccgactgccacaaacactcgagtcgttggaattccagtaccaccccgccgtcactaattcgtccagattgatctaaagcaagcgagtctcgacttatcgaataacctagttgatttatgtataattcgacgtattgagcgtgtgtattgaggatgtctgcgggctaagcctgggtttccccaggcgaaggtatcagcaaccacaggggagacaatctgctaggttattcacgcgggaaaccacttacctatatggtagagatctgggggaaatgaagatttaagtcatgcagctgtgttcgtaaagtcttgagatagaagaaacgaggagctgaggccgctgcaggagctgttcctgtacgagtaccacctatctcgtcctgttgtcgaacataatccgctttttgctttaacagctgcaagtgtacttgaaagacaaataattcatccgcagggcatgacttggttagtgtgatgacccgaagcgcctcttccatctgaggcgtccatcgtatagcgtcttgacgaccgagatgtgacgaaacactaggattagtcatagtttgttagtatgtgttgaccgtaagaggatcacaatgattatgcgcacttggagctcaaaataaaacacgctagtaatgccctctgtctttccaaaaagccgtcaggcaattgatcgttagggctgtgaggttcttcagcctgcccttgggtaagagacataatggctttcacgtctggagaggatggtttgaacaaccgcaaatcatatactattgaaatggcgagcatcattaggcgagagacaagatccgctctgccaagaaaggcgtcggtactccatgctaggtaagtcagtaatccaaggagcaagtcgatattagactggacttcgcgcaaagcagacgtgaataggatacgcttcagctcctcaatttgacccagtctttcttgcgtcgagaatatggtaacagtgtggatggcttgaagtaagaaaggcctgttttggcgcagatacgagtttgtcatgtctggggtaaaatcgatgaaaggaaaacatggcagcattcgggatcggaagaaatcgagacgctcatcttcttgggtcagattcggtggtgttgtgacgatcgagtccgtcgcaaacgtcggcccctcactgatattcagcccagcgctggtgtttaccaaggttccattcgaatgagacgtggatgatgaaataatgtttccgtcgagggagagagctggttgaagtggctcaggtacattggcggaagtccccgaagccccctgggaaacaaatgactgcattgcagataataatatctccatcttgtcttccagccgagcgatgcgcgaatcagacgatccggctgcctgagcattgcgtctgcgaaccgactctgatggctgacaccttttcttgagacggagacatctgagagaatcattagctgaatatcatctgattaacaggccggtagtcattgtgacctttcacacttatcgccgtttggggtacgcacacatcggctctttgccttgtagcaatgcgtgcaagcttggccatatgtgctagattgactgagagccgggtttgatctctccatgttgcctggacaagctatgctagaagacaaagtaggtgaacaggattccaagacactttcttgttcaaacggaactccgccggtaactccgtctcaagcggatttggccccgaagtccgcaacccgggcgtaacaaattgttgaatgagtagtataatattagatgttctataagagtatactctcaagttctatccttaatggaggggacatgaaacagctcttgtgagctcacaagagtaccggttataccaaatcgactacggagtgctgcatcggtagaatcgacgtcaagaggcagccttagtagaacaagcattggataaaaaatgctcatttaatattggtgtctcactcgcaagggcttcattaaaaaagaaattcttgttccaccaagccggtcaaccagatttatagatctttagaagcgtctaggtcgttcctcactggtgaaatatcgacagcaaagtcgtgccagtaatagattcttctcgtttcggtgtcgcgtaaagattccccgatatatcgacagctgtcggtcaacaagaataagcgtaccatcttcgctaacccctacccttgttcgtgcccaattcgccatccctgtcctttcaaggaggtgatgcgccaagccacgattgtcaatcaactatgcgttgctgacatctatcggagacgcggccgaatattacctatcatattagcaaaaaggcgatattagccccaccgaaagtgcgtctgctcatcaagatcatcatgattattgccaaggagtactctgcacgaagtacagtctttcgattatggttgcaggatcagtcaaactgccatctgattgtaagggatgtgtcattcatatctaaaaatcgtgcatagtcgtgctctcgcctgcatactccgttttccgtatgccattctccacgtaacggcatcagattctacattccagactcatctacggactacccgagaataaacttattcctcctatattgcatgtcatataccaagatctagtggtccccgagactcaagctacgaactatctcattcccggtgaactcctccgaagctgggttgccacttttcaagacatgggatgaggatacaccggtaatttgactcgtgcgttaatccatgctcttgattcagcctatcaaaccgcgttctctgcgcggattcgtacatggatctatagttattgagctatacctccctaccctgctctctcgcccggaagcaccaatgcccgacctctccaacctcgtaaacatgccactttcagcataagcccggcgatcctaatcccccaagatatcgtattatttttcctctgaccgaaaagatcgccaaagatcgcgaattggccgggggaaaacgtattcgttgtcgccaaccccgtccaccttcatatgagtcaaatatgattattaacagagctttcttgtcacgagtatcatttcttgattgtattaagcgagacctgacacaagatcgatcgggattcagcatgccagggccaggggcaatccccgcgagttttggcgggttccacttttggatcttttgtctcgcttgatcttgaggattaatttttgttttctcgattgtgtgaataacgccaaccgattatgtacttttttcaatctgttatggctgattgggtgatgccactactgccgaccagtgaagccccgttcgttgcccaagatggtacggaatacctgtttcgacaaagccaaactctcagggtgatctgccgatcactagggccgagaattggacaattgcttcccacatgcaagtttagccgacgacaaggaatttgccttgggacccactgctgcaggtcctggccctatctggcatctggcataagcatatgtcaagatcgggagatggaggtattcgggtatacgaagagcgtagaaacaattgactcggacgacagagcatccgtacccctgccatgtccttccactccgcagctgcagctgcagcctccaagcacagtggggaactcatcacaacattcaatttatgagctctttcgggtcgataagcaggggcacctgctcaatctagactcgcatggccgactccggtctgaatggaatggaatctctcaacaatgcttctgccgagcattcttctcttggattttgtggcttggtttctgttcctgttgggtccaccattcaagaggggtgtggtcagtggcttcaataatatcctccaattatggatgctcccaagccaaagctatcgagaggttatataaactaaatcccgtggaactgatctagagggtgtatataggttaggttctcggtcgtcatccgttccagtcccctgcttgattaatattcctttcttctatttattcctacaataccatatttgctatattgtctactctcctttgacaacatgctctcaagcaacagatggcacgttgtggcgctgttcctagctcttgtccctcggacaatggcagatatctgcgcgacactcaaggccgggggcattgatatcgaagaccgtatctcattggcctacaacaccgacctgaccgagtattggtccgcggcatgcggcgatctcaagccaacatgtattgcagctccatccagtgcagcggagatggcgcaggtaatcaagaacctgaacgacgtggatactctcttgtttgttctctccttgcaccaacagtaaagatgtccgctaaccctaaacagtgccatcaagagcggaggccataatcccaacaatggattttctagtatccaggacggattgctggtttcgactaagaatctagatcaggttgactataaccccacagatcagactgttgttatcggtcctgggctttcatgggaagaagcccagaagggtctcgcgggaactggtcgggctattgttggaggtcgaatgggaggagttggggtcggtggatatatgctcggaggtatgtggatcagaaatcaacaccgactctatctccaatgatttgtaggcggtatgagtttcttgagcacccaatacggctgggctgcgaacaatgtcaaggacttcgaagttgtcctggccaatggcactattgttcacgcaactgaaaccgaaaacgcaggtgggtgacactatactccgtatcaacgccgaaacactaacgcttgatagacctcttcaaaagcttgaaaggaggcggcaacaacttcggtgttgttactgcatacaccgtgcagacacatcctcaagaccataaggtctggggtggcaattatgtttacacatccgacaaagccgccgatattctcacagtagtgcgcaacttcaccgacgagtatcccgatgacaaggcggcaataatcctgacattcgagcgtggtctcgtagttgacctgtgtatcttgtttctcttttacgacggccctgagcccccctccggagtcttcgacggcttcactgctattgaacacacctcaaccgccaaaacctgggatacttactacgacctgctcaagaacaacgacttcttcattcttaagtaagacgagcagcttcaatacttggattgttcgctaaatccctactagggggcaacgctataacatcgctaccgagaccacgcctcttcctaataagaccgtgggagcagccccgctccaggagtactatgagcatttccgcgacgttaccgggtccgtactaggagtaaccgggataataggcacagtttccttccagcccatgcccaagacattttcccaaaaggctaaggaccggggtggagtacgaattttattcctaatggaagaacaaggacgatcatatcactgacaaatccctaggacctcctcgatattccctccgatcaaccgtacattatcctggaacttgacttctcctacgggctatccaccgacgacagtaaggtcgacgcagccacggtcgaactctatcagggaatggacaacctggcccagaagaacatcgataacggccttcttcccgacgtgtatcgaccattgtttatgaacgacgcatactaccgccaggattactggggccgtattagccccgagtccaaggcgcttgctctgaagacgaggaaggcgtatgatccccaggaattcttccagaagcggacgagtggaggctggaggctgaaggactagacgtcaagactgtctgggcctaggcatattggatatatttatctcgtctataattgtatttacaaagactaagtcaatcaattggttttaattatgactcaagagaaacgtgttggggagtagatgcatgagctctacatgatatattctggtacggggtatacttcccgtggctcaatactaaaaaccctaccaagcagctccaatcggaaaataaacacagtaaggctagatgcattgccctgaaacttgatctactgtgcattttccatcctagtcaataattagatcaaatgtaggcgcctgcttcagatccggagacgcccagggaacgagtggctgagagcgacccgcggcgagttagggtttcctcccaagcgccagggtggattcgtcaatcggacctatattgtatcttatattataattataattatccttccaatggggtattgtctttagcaaagagctatgggatctcctgctaccttaagctactatccatgccgatcgctatatccggtagagggctcaatgaaagacaagtcacccaattgagtacggcgcttctccaatatgtaacacacaaagacacagcctggcttagagagattctagatctgttgctaatttaatctggtctagacttcggacaattgatgtcattgggagacctttgttgatgtttataaaaagccggaaccagcctgttcttcaatctaacaatcagcttcactttctcttcactttctttcagagtacacttcccttgttcttgagcctttcgtttcatacatatctacctcgtcgttgcttgcttgaatactatcccactcatccgactctcgatacatcggcgaatacacaatcagcccggccaattctccaattccattcattattctaatcagcccattcaaaccaatttcaacccccaagatgtctccccgatacggtgccctcggcgcaactttccaattatcccgcctcttccaagtctgctccctaattgccataatcggcatgacagcaaatttcatcagtgtgatagtaaacaacaatgccacacccccaaatatcctaatcggaacgatcagtgtggtaagtctaacctcgtctacactctaaaccctctctagaaattcactaacaaccaacccacagacctgcatcgcagcaatctactgcataatcaccgcgatcctctacacagacgacatcctcccgttcctagcctgtgccgtgctagacactctgctgctaatcgcactgattgtcgtcactgttatcgtcggcaaaccactctcgtacctgaagtgtacgacgctagcggagctgggagataaggatgctacgttgtatgcatttgcgtcgagactttcgagttatattgctagtgttagtgggaagattgattatgtttcgtggattggggcttcaaaggcgatttgcattgagacgaaggctatttgggggttgagtattggactttggtgagttttgtttcttcttcttcctgagtttctatttattttggccgttgttggagctttgctgactttggattggtgttgtagtattctctttttcttctctgttatttgcaatgtctgtttgtggctacagaagaagaaggctcttgcggtgaagagtatggagtaatgaatggctaggatttggaggcgacgctggaaaatgatatatacggatctatctgtgaggttctgagatgatgacagaaatatagtacgacggaaggaggtaacaataacattcaattttgctggtgctgcgacggtgctgcagcactatataacagtaagtatttcaagctaccaacggaggtactcgtagaattaaatgtggatggcatgtccagtaatgaagtttgtcatattgtatattcggttctctttcttttttctttctttttcgccttcacggaacgagggcgatacaaataatgagggggtgtatcgattccggttgctttcaccaaagtctcctctgggtggagccccaatcattctcccatgatcgccactctaccccgagggctgatagatagacggataaatagccttcttctcgagggaatacatgggaaaccgttctgccaactttgctatatgcctagaagcaaaagtcttgcatctatcccgaactcacaggcggaataacagccacttcgcccccagcctgtataacaacctccctatcttcctcgacatcaacatactccccgttcagactaacaccacaagtagacaggaccttgtgaacaattccagggtatcgctgttccaattcgccaaacaaagcggacagtttcaggggcgcggggagcgattctgtatttttggaggtgtattgggatgctgttgcgaagtagtggattgtgaatgttttcgacatggttgagggagcgaattgactgaaatgacagtgggagaggttatgattgagagtgaaaggtgttgaagaggtcagttggataggcagataagagatggatgaccaatgatctgcccaatgcggggtaactaaatcacactcaatctataagaaccagtcatgcattctatgaagttcatactacatctaaatctccaaatctatctacttcgcaagctcacgaaatgccctcgccaaatcggccttcaaatcctcccaattctccaatccaatgctgatcctcaacaacctccgatcaaccgtcgcatccgtcatggtcctccactcaataagcgtctcaacaccacccagactagtagcatgctggaagaaatgcaatttactcggtaattcacgagcaaagcgcatctccttcataataatagaaaaaacaggcccgaacccattaggcatctgcttcttcaaccaatcgccctcaactttctgtagactggcatggaggacctcaccgagaacagcctgcacagccgcctcgtcgctggcaggcgcgggattaggcgcatgaagagcagcatcaagccaggaaataagacgggcggcattctcactctgacgctggacgcgtacctccaatgtgcgcagacttcgaacgccaagccacccctccatgctacccatgacagttccgataaagagacggtcggatttgagctgtgcggcccagtcgtcacggttcgtggcgaggacaccgcacaacatatcactgtggccgccgaagtacttggtgcctgagtgcatgacaatatccgcaccgaactggaatggctcttggaggcctggtggggcgaaggtgctgtcgacaataaggtatgcgccacgggcgtgggctttagcggcgtaggaggcaatgtcgaaggcggtaccttgggggttgaccggtgtttcgaggaggattacgtcacctttctcgagttggtcgggttggcagtcgagggggagtttttggagacctgttaggcgggtgaagagggcgatgacgccatggcagccgtggtaaccatcgccgacggagatacggtgggggttgaggagggtgagggcaccgtgcagggctgataggccggagctgtagcttataacttggccgtatagcagggaggacaggattgtttcgaagcgagtagtatttggtgcggacatgcgcgagtagatgtgggaggttggatcaaagtcggactacattggatatgtgttaggcgatgagatatagaacagcgagtcaacgtgcatacaggagtggcatcagcagccggtactagctgggttggatcattggaataccgaaatgtagtagagagatgcataggaggagcaacatcagtaacgaggttcaaggcatcatcagcatgcaaggagcgcgtggaggcgccaatggcttcgctagaatgggacatgataaaagatgctatgtttggttcttgaattgtatgcacagaaaaagggttcgtcaagcaaagttataatacaccgatctcgggggcgggtgggggaagagggggaaatcacgtaatggatcacgtgttggagaaatcacggggagaaagaacaagagaggtgtggaacacatggattatcgacggatggagcccatgcgggatggttctcgcactgatccaggaagagctgccttgaaggttgcgcgtgctatcgaacaaagttagcgaaagaatagtacaagccagagacacaactcaccagcctctgtatcgaacgcaatggcgaggtcgtcgtgttcgatgggatactcaggcatgtcgaggcacacaaagttggaagctgggttatcatccttcttaggcagtgcgaacttggcatctaccatacggattccgaacttgccggaccgggtgaaggactgcatgatatcagtacccttaagaacaaagttcatacaagttccatggtggaagtccccaaagaaagcaagcatttgaatgactttctcttgtcgaacgatctgaattcgtgccagggaagcttcccatttcttgtaaatcggaaccatactccgtcggcgggagatggtgaacgatgtagccatactagtttggtcagcaaaatcccaaccaaagggctagatggaactcacccatcataaagcacctggaagccagtaacagctgcctcgaaagcatgaagatctagaatagaattagcaaaagcagacagaaatgtcagaagtagacataccttgcatggtggggaagtccaaccggcggatcgtaggctttgtcttaatcttctcaaggaagccggttaattgccctggcagttcagggcgaatgaggttatccgcaagggaaagggtcaggtcctgttgccctgagcggaacaagctcatgctcgtcttgctctggacatccaaaccaattttgagttcgccaggtcctagatagaattagcaattcatttcggagcgaggagatagagagagcccacctaggttgatacgatccgtcacagagccccattcagtggcgacgaaggccctcaaatgttccgataggatcgtcggtccataaccatggtcgacgtaagcatgctcctgatcaaggacagatacgcttcccgcggggaactgaaggtatttgaccgcgggctgaccggtgaatggatcttcgggctgctcaatgcaataagactggatggcgaattcgggcgacttgatctctccctcttgtggaagcatgccgagtagcacagagtgcattttcgaacgctcagccgcctcgtggaaagtcatcaacatagatctcgtacggccgtcctcggtcactttgaggagaagagcgggagcaccgtcttctccccgcaagagaccgaacactatcggtgagccgttgccaaaaatatggcgaatgctgctcagagtcttgacctttgggctggtcaggatagctattcggaatccccgatgcgcattgcgagtaccagtgccttctgtcaccgtgacagatcgctcgaacaaacggactcgacatctttctgtagggtctggagggaacgcctttggtgtgccgggatccatatattggaaaattttgatagtattctcaaataccacagtctcacctgcctctgggtggagactgttctctgacttctgggtgtatttgacgatattccaaagagtcttgaaatcgtcttccttgaacaggacatccaactcgaatcctcggggaagcttgactcgcatagaatgggaccggacttgccattccacatcctcccaagtcggaccctgcttgcgatcggactgtatcaaaatgttgacaagttgactttggctagtgatggccgcaaagacataccaatccgctcgttcgcgtacgatggtcaatgcgcagggcatggcatattgctgttgcccatcatcatcactggagctgacacagacctgcacgaacatgctaccatagctgaagtatcggcttgtgtcacccaaaggcatcatatggaccaaacttggtgtcttgcctgcattatctaccagcattgatctcgtcgccgcaccagataagactgctgaaacatcgggcgcatagaaggggtaacgcagccagatactagtatccagctggctgggagagccttcgtccgagttaatcacggcgaggatgttgtttcgtttgatggacatggacagcgaccggagatgatttatcagagtgtgatgtatactcaaaagatcagccaaatccttgtcgccggtggtactcgcaacggccagtagggcgtcaacacccatagcaccgtatcgagagagttcatgatgactgggcacaatattttcatttatccataatgcctttccaagatcgaccacagcttgcttggcgtaggtaggtggcagtgtcgaacgggatcgggcatacgcttccaaccgtgtctttcctcgtaaaaaccaccagaccgcagcccgaatccattctgctagcgatgtttctaccaatggcttaacctcctctgctgcgagttcgatagaactctggtattgtgtattgtactctttgaattcagaaaacgcggtattgccaacttggttcgcaatattgcgaagagaaaacttggggggttggacgctatgtggtggtggctcttggccctcgcgactggggggtgacgcccggtttgatgcagataggtcttggggtggcgctttggcctgtattggtgaaagcttgccggggctacctgggatgagattcgtaggcattcgtgggtcaatggggctgagactcgctggtgcgcgttctgctgaggggcttggggggcttcggatcgaatcgacaatagatctcatcgacagagaaattgatggcgcatgcggaagtcccgccgttggggctgcttcgtggggcgatccagaattgtaaccttttatgagaggttccgggctaggaggactggggggactagggggagttgagatatcatcgtcttcaactccaggagacaatgcatcttcctcatagcgatgatgcagtgcgcgaccttcttccgcttgcatcttatcgcggacgcgttgtgcgaactcggtatcgccgtggagtttcaatcgagcgccgccgtcgcccgcagacaacgtgctcaggaagtcagcatcctgtggattttgcattagcagaggtttccagtccaatctatcacgctgaggcgaacaaacctcttttcgggatcgcgcatcactatctcccagcgatgtgtcaagtcggagatttggcagttgcggacgcgaaaggtccgaccccggggttcccctgctgtccgacctctcacgggcccgcgaaatctcgattgttggcgattccgtctcatcgcctccttccccaatcacttctgggttttgacggctgaaacccacccgcagccctttgcccttgcgcccaccatgcttggcagaggctggagaggggttggggacagtctgaaattggtctgagaaattgaaagaggcataattatcaagaggcaagactggcgctgacgccgacgccgacgccggcgcaggcactggcttggcgggagggtgtttggagatgtcttgtgaggaaggaaagcggtgggcagcgacggtttgcggagttggatcgataggcgggggggctgcggctgattctggggcacgagagctcaaaaagtctgcgatttcttgatgctgttgcaacgcagccttatgcttatccttggagaacagtttacttttccaatggggctttttcgcgggtttggcctgctccgcgggcagaaaggagaacgggtcatcggcagacatgacaggaaagatagcgagtagacacagtccacatcgcactcaataacacacagacacacacaccaaggatacccgttgtgaaatatcccctccccctgtgtgttgaaggatcgacaggggctttaggcctgataagaattgggatcgaatagcggggaaggggagatgggagagccagagaggggataagaggaagagatgaaggtgtgtagtataaagggctaagtgcagtgtcgagtgttttgtctcaaaatggtccaaaggtgtcaagtgtcaagtgtcaagtgtcaaaagtgtcaaagtgtcgtcaagaggaaggaggggaggctaatctaagcgcccgtgctccaatgaaagactatcagaaacacgattagccccgaattccaaagtccaacgataaaaagcaaacacttactccgtatagagattagattgtcaaggtagctggaccagcagcgtgagacatgcgatgggtaagaagtgaaagaaggtacatcagggggcaaaccttggaagaagaagccctggagatactccgcaggtaccaattgccgcagtggagtcggggctttttgtggatccgatttagtatacgaaacgattaatagggatgtgcatagggatgttcataggcatgttcatagcgatgttcgtagacatttcacactgctgtacagacatggtgcaattccctatctttcggtctatacacttccacatacctcaagcacccaacgcttttcaagccaccaagggcgctatatatccaatcagcatagacaatttgctcgtctcatcctgaaactccactagacccaatcggattgagggacccgctgctgacgagttttgagagctttgaagatcaaagatattcagtgacattgtcatgttgttaaatgatttgatattgggcatccctgcctacgatctactgccttggtacacttcctactccatagttaataatatgatcaagaaaccgcgcattcctaactaacccatcctcatcatatctaggggcttcttagcgcccgaatttcgagactaatctaattaatgaaaccttggattaattggttcatttgttaatatgcccctaaccctcgtataacggtagcttctttccaaattggaggcttggctgtaatgtatcttcctcaatctggcatttgatcagatgcccgtttgccggcttccccgttcggtcctcccgtttccaatagagtactttgctcaagtctctaatttgctacactcatatattcatagatatgaccccaatggctataaatgtctgcaaccagcgagtatatcgccctttgcttgtcaccgctatgtcttgctcttagtagctaggttctatacggttcattgaccaccttgacttgacccgatggattggaagcccatgaaacaaggaaattcaagatcaaccgtgactcggaccaccccacatgtagacaatcaatatccgcttgtaagacccagcgttcatacctgcatatacaccctgaagtagatcgtcccggtttcgggccctcgggaggccgtagaactgcttacgcttacacacaacgcaatcttacctaacaacctaacattgaaggttaactagttagtggagcctctgagcttgaatacaatatgcgtcgtacaaacgtattacaatttaatgaaagatggtggctttgaccttggaaaatccggggtctattatcctgagctctcaaaggcgtgggggaggtacggagtagaaagccctaaatgtctcacaccatacggagtacttcttgtattcttacaattttcggcgcatgaacatactaaataggtcacttctacgcaaaccttgtgtacataatctctgtttgtttcaggccaataataaacatccccacttgacaagctagttagcgatatacctattatcacgataacactgccgagaaaacccttttttttttcatctgaaactttcaactccaaaggtactatttgcgatatataagacatgaggtatgagacaatatgacagcattgtagaactagtcggaactatggaaagggagagggaaggaagactggaggtatccagatacggtatgtgacattgtgagatattgaaacgccaggaagggcagttgtaaaccgttcgctgtcaccttgtttatactaacacaacacagttcgtcgaggaaggatagaaagatagcgaatgtgcggagtactactagattaggcgagagtttacggctttcggctgatggagctgacggagctaggttcgttcaggcttagacttgtgggtgagaatgaaagtgaaatgaggaagtcgatgtggcgttaatctttttgtcgatattcgcttaggggtgaaacattgtatagccctacggaatacacatcggatattcaccattcagtatacttccaagtttctagaaccttatgtatgtctgaccatttcgagatgaatatagacgactacaacattgtacacaaccgggattcagggattcaaacaacttctgtaccgggagctatatacgagcagggcctgacgccaccgtgattgtctcaccacaaacctccatcggttaaaacccacagtggagttagatagctaacgcaggacactagaccctgaaaggtacgccattatctgtaccttcgttgtcgctcaaccaattccgtccgagtggtcagatgaattcaccagcctcaccccgtttagggcaatgtgccacatccaaccaccactggagaagatatcaccagagagtagcccttcaacatcataactcaatagtatagccgacgccaagccttgctggagactgatcagcatgaataaatcattgaacttcaggcatgatggggccactgatcagttgttatgtagtgagacaatcaataatccaccttcagcgactatttcgagtcggccgaaacatatgagggggaatagttcgagaacccatgattctaagacaaagacataaagacagtcttcctcgtaattgaagacaatatcctcacagcaggagtgaattcatgcagaaactcaggatctcagtcggttatttatctccgggggttcggctccagccgacacagtggatggaagatagattggaaatagttggaaatagtcctaaaataggaggattgcgcatatctcccataattttctattttgagaattgtatttcgttcatgatcctactctgtttatccgtacggagtagaagaaaatagtatagcagcctattattagcacaatcgagtagtcagccgttaaactccaccaaggccagaccaaacaaggcgcagcaacaacaggccaaacccactgcgaaaactaagccactttttttccactttccttgtgttttgctctgacttcgacttccgatcctgcccccgggatatgccgcattggacgacttagcggccgacttacgacgcacgcagatttacgtacctccaggcaccggcctaacttcgaacccccccaaactctatcaggcgagactccaggatccttggtctattccctgcagtgatatttttttgtcaatcacagtgccctattgaccctgggaaggggtgcgcgcggtggacgagaccccgacaccgatccattgtcaacacaacgtggattcgatcatctacgccgggggttgacctccccgaggaggtcatcccggatgcccgaagtggacatgcacgactcgacggagatcgagctggacggacattcatcatcctctcgacggaaagcaagcaggcggccgcgacgcagtggattacacattttgcaaggtcggccgtggcccgacacttcgaaacgccgagcacaaccatggagttcggtgtggtggattgcactgctgtacttagtgagctttgcatcgccaggggctgctgttcttttggactttgaaaattgtctatcaaaatccatcctcgagtccgaccctctacaacttcaattcgttcctaccaacgtgtccgtcaaattcaaccttaccaaccctctacacccgctcgccatcacggtctatggcaatgtgtcgggaaccacgtctcaaaccgcagactatcccgcacccgattcctctgtatggacaaatcccaattggaccgatgggaagattgaggatgtgagcactaccaacaacaagtacagcacgctgatgacggatctcaatgtgcttagcttcacgccctttagcaatgcctctcgtttccgtgacgcggtcactcagggcaccctcccgctgggtccggtctttaattacaatatgtaagctattgcaggaagagaaagctctgcgatttttaactaatccctttctcttatgcaggagtgatttgaccacattacgagcgttctcggttcaacatgatatgctttcaacttaccgtttcggaactatcacacccttattgatagttcgctctggagatgcatccgccgttcagctcgcctgcgttttggtgaacgcgacgccggacttgggaacatctctcaaaagtgccattgcctatgtgcctctcatcattttgatactggtgggaattgcgaccatcacggccgccatgtttagcccttggggcacaaccgatctatttcggtggacaagcaactacggccgcgatgaagatgttctccgacttgtcactcctggatttgcagattgcctgcaataccttcaattcatagtattaacgggctcgctttctttgaattacccaggtttcttccagcctatagtgagtcagggagcatggtcgactctcatgttcaaccagagtttcgtcagcactgaaatcggccgcgatcccgttgtggatggtctatatgccatcaatggaacgtatggcctcgaccgaatgaaccacctggttggcatggcctcatctcaggatatctggcctggtatgatcatatgggtgctggtaatcatggcttgtgtgacggtggtcttccagatcgcattcgcgctccgatggctgtatcgtgagttggcaaacaacaccgatcaggatctgcgtgccagaaacatgccgttcaccatggggaatctcattcgcattgtcttcaattttcttctcttgccaatcgtttccctttccttcttccaattggttattgctcgtcaatcaaccgcttactgtgttgctttggcggccgtggtgatcgttattattgcttgcttcgcgatttgggctatccgtgtggtccttaacactcgacccaaagctcaccttttcgatgatcttcctacagtgctattgtatgggccgctctataatacatactgtgacgatgcagcagcctttggtatcgtcccaattgtattgaacatcgctcgcggaatagccattggtgctttgcagccgtctggtatcgcccaagtggtaatgctggccatttgcgaagttgtgtctgtactaaccctgctggccttccgacctttctcaagaccaacccacatgaacctgtatcactgcctcttctctattgtgcgtttcttgacagttattttgagcgttgtctttgtgccgtcattgacactttcggatgcggccagaggctggatcggatatctgatccttgtgctgcacgccgtggttctcattttcgggttcttcctcaacgcaatgcaaaccttgatcgaagtactggcaagactggctggtgcgggcggtgccactcgtggtggcttgacgaaggtgcttggcatgcgccagctctcgaggcgcactccgcgacgtgatcttactcgccagagtatgggttcggaggctgctatgcttggtcacggtgacgatcgtatgtcatctcagtttgatggatcgcgtcctcgcagtctctctgggagctctggtctgcttttgaaccgtgctagtgatggcagagtcagcaccatctatgattatcccagttcgcaaggaggcacacacagccgtgctgctagcgggggattccccacacctacctcaaccacctatcaaggagctggcttccctagctcgcccagtagtggtaagatgatgggaacaaaccctcgtgatccctattaccggccacctcgccccgggcgaagaacgcccccagcaagtggtgctctcgcgaaggggaagagcccgtcaagaggcttcttgaaatcaaaatcaagccgccgagcagtcagcatcgatgacgacctgggagatggcatgtctggccgtgctacaccagttccagcatatctagcaacgccgaaggatgatatggagctcgatacccctcgcaagccgaaggattatgctgttcgcgaggttgatttctactatggtgtccgaggcccaccgctctcccacagcggtacgcgaaagttgaaaactggcccagccgaccccacaggtccagtctcgtctgcgacgggctggttccgaagcttgctccaagggaagacgaaggacaacgccaaaggatttgaggtggtccgaagtgctcgtgcgcctcctccaggtctattcccgagaagagacgactttaatgatccttatcaggatgatataggcatgccatcagccagtcattctcgggaagtgtctaccggcaatgttccctatcaggattcggacaatgaccacgaccccgaaccgtcatgctcgccagtactgccacaaattaatacctcaggtggcggtggtatcgaattgcccagtcggacggcctcttgccacacacaggcgcctggtgaccaagacgcaggaactgcggctggccttccagttgtgaccgagaccctgtctcacaactctgatataagccagcactacgagcactccgagcaccatctccagccagaaggctccaccaccgcgcgcctgcctttcagcggaagtagctcgccatctcgtgaacgaggtctgtctatgacctctacttcaaggtcaagatcaaacgcctcgagccagcagacgggtgctcgaccctcgagtctgggctatgtacctcaacatcgcgcgcacgaccacatccacgaggggagccccgacgagccatcctttaaggggagcgcagcagaacttgtcgatgaagcttcgctgggcgggcacgagcgttaaaagtatgaaaaaggcagtcacatatgtattttgaaccactatattcgtcttcttcgatatctacctctctctatctctgtctcatggatctcccgccacttattcctcatctatggatatcgtcaccaccatctcctgcccgaaataccggcgaattgatgccaccatcacgaatctccttgcttcctgtgcgtctatctcttgctttgtttgtcaacctaaaattgctgcaacggcgttttatctctgatcccgaggtacacctaatggggagtgaactcattggcttcttgctatcttcctggctgtcgctgaatccagacgacatgctgttttcttttggaggctttgcttctttctgtatctgtctcttttcgctcttcttgtatcaatcttaggacacactaatgccgggatcataattaatgaggacttttcattagcgcactctcttagtggtaataataaggtcttgatatgtcttagaactagtaatagttctcaactatataagcaacgtatatcttctgttgcaattatcaattgaactatgggaggcttcgagcagagcggaaagaaacaaccgaacccgatagcacgcgggcagaccgggccgataccgtcaatcgccacctccctcaccgcccgccccacgataacagcctgtatctgggcccaaacataacgcttgcaccatttcctctcttgtctctgtgagtcaagtgtcaatatccttgttttcttctttgctgttgccatctgctgttgccatctgctgctggcatcgctactgtgttgctggcatctgagagcatagtcacaagactctcagcctcatcatctcctaaatacgacccaatcagccttggctccatgataagcatcatcctcacactccttaatgtgatcttcggcaaaaagcgtcaacgtcattgaagctgagcccaggattgcataaaaggacctcatctcctacacctatattctcgacatccccgccatatattcccctcgtcatcgccactcgccacctagttcatgaagactgtcattccaacggccgagatcgatctcgttgcctctgtcggacagaatatcacagaggatctataccgttgaacttagcaatcatgcctgggtcaagcacggcatctagctcggttcagtccagctccccgccgaggatgcaggcaggcacgaggccggtcgaaagaccagaggggcacggcacaacacaacctagaagctacagcggctatgaagaaggcagctccaggacgagagtctttcccattcgccccaggtcagaacgtaaaagacgattgaccagtaccggcgaggatgcgaggtcgcaatggggacaatctggaggcacggctggaccggcccgagacaatgggggaccctccagaagtatcttgccgcatagatctgtctcgatggtattgccttcgtctcgtactagaacttctatatccacagcacctggctcgtcatttgcaacagcaattgatatctcttcctctcccccagggacgcctcgttcctctaattatggcgaacaactaccgggtttctctcgacgggagcatccaacaccctggattaatcaatctcgctccgttgcatctgttcacaatgatctacacccaccatttatggatatggctctccccaaatggcaggcagattcggacgtgtcagaatgtccgatctgtggggtagtattcagcttctggcacagaaagcaccactgccgaaagtgtggaagagtcgtgtgtgcatcatgctccccacatcggatcacaattcctaggcaatatattgtccgccctcctgagttcgttgacttccttcctgattccccgccaattccttccaactctccatcagtcgtcgatctcacaggcgatgaccctgttatatcatcatcaccattatcatcaccatcagcatcagtagcagcaacagcagccacactcaaccctgctcttggcggaggcgaagaagtacgactttgcaatccatgtgtgccagacccaaacccgaatcccattagctacagtaccgtgcgggcacacggccaccgacccacccattctctttcatccactatggccaacacataccatgcctcatcggtaagttctcgccactttacttaataaaaccaagctgacaagaaaacacgcagggtccaagcaatcccgaagctcgtcaggaacgacgaactgtgggtgtaaatgatcgaccgcagttcttaaatgagttgaactcgcaaactcgccaagttccctcgcccaccgctggcatatcccgaccacatcgttcattttccaaccgcgacggtaatacaacccgcggacctgcgttgaacgaagatgatttctgccccgtatgcagacgtcaatatcttccactgagtcctgaacagcctctcgaggcgcgccaagctcatacccgagcgtgcatcgagggttatttgagaccaactgccccgccccggacatcatccttgcaacatgatcatccactgccccatcctccaccggtagcccgtatgcttccctttgtggccacggagaaagactgcctcggtgaggatggccaggcggcagagtgcacgatctgtatggaggactacgaggttggacagaccctggcccgccttgagtgcctgtgcaagttccacaagcactgcattgttgactggtttgagaggaagatggagtgccctgtccacaagttttcctaatagggtgcacatccatctaatatgaatttcaagaaatatttttgctagcttagctttttgctttttactacttttggctcacggcgtctggtattttgtttcttatatcccgcttagcgtatcaatgaatctaatctattttatctcgaaacctatcagatgctgatgcagatgccgagggtatgtaggatcatcagtcacgtggcccctgatgttagttgaaactcaaaaatcaaaagcacttcacttcacttttggccccaaagtgaagagcaagtcaaacaggacccagtggtattataagtgagaggtaagcctggtgttatgcattccccttacttgacattattccgatgaggtatgttgatcctccacatcggtggtcggtgtttgtgatcaccgtcctccgttttctcttgtcgcacagccgaggtgtcagcaataaccacactgaaaatgggataccgagcaatcacgtctactgatgaagaattggaattaacgcgaatttgtaacagtgataggtccccgagccggtattgtaatcccgcactgcatggaaatcgatccgcagctgcaacacgcggaccctcagcggtctttttatacaccgatccgaccgacaatgagcacaggcccggaatacccggagcccccatcacacgcacccctcaacccttacccaagccgggatacacatggtgatggacgcggacacgaacatgggcctagggacacgcacccatcattcgggatgggcccagacagcaaccaatccccagatccgcatgacccaccaggcgacgccaaacggtcgcgtgcatgcgagccatgccgacagctgaaagtgcgctgcgacccagacccggcgcacccggaagggtcatgcaagcggtgcgcgaaagcgcggcggacgtgtgttgtaactgcgcctacgcgcaagcggcagaaaaagaccgacagtcgggtggcggagttagagcggaagatcgatgctctgacggcgacgctgcaggcatcaaattccaccagtgcgctgttctctggtggagcggggcaacgggatgagcagcttgctggtcgaagatggattgctgggagcaagcgacagcataccggcgaactcaaggatccctctggtgggctgttagcgccgcggtattcgcggccgggtagtccatctgcagagcagattcctagccatgcatcgaagcattggcgcagacctgttggtgttgattctgcgccgccgccgccaaaacatgaggccgggaatgagtttgctgatatgatcgatcgcgggattatagattacaagactgcaagcgcagcgtttgataggtatatccaccagatggcgccagagttgccttttgttgtttttccgccggggactacaatgggcgaggttcgccgcaataagccttatttgttccttgcgatcatcgcggctgcggttgccgtcttcaattccgacgcacagccgatcctcgtgaatgagacatatcgtctgatcgccgagcaggttgttgtcaaaggccaaaagtcgcttgagctggttcagactataatggtctgttctatctggtatctcccacccgataacttcgacgagatcaagttctattctttgatccatatggcggtggtcatggcaatggaacttggattaaaccgtcgcatttccgataatagacgcagcttcagcgtgatccgcgaactgatcattaaaaagccgacgggtccggcatttgatccaaagggaccggaagcaaggcgaacttgggttggctgttatttcttatctgtccagtgtgtttcaatccgggttgttatggtatggagatcgcaagctaactttggcaggatgtcggcggctctgagaagagtacacttggtcacctggcagccgtatatggacgagtgccttcagattttagaaacccacccggatgccctaccctccgatcgaaacttgaaatggtggataaagctgggatcgatcatggaggatgctggaaatctcttctcggaggaggatcctgggtgcattaccaccttcgcggacagcaaggtttggtataatattaaaatgtttgaggatagattggcacaatggagagaggaggtcccacgggacgtttacactggtaagcgctgatcttgagaatattctttaatattctgctgacatccttctagagccaatggttcacgcagaacatgtcctgaatctcttcgtccatggatctgcaatgtgtgtggactataacacggtcaacaactctccatctcaggatgatttgcataactcatcgattgcgattgatgcgttgagcacggccatccgctgcattcacgagagtctagatgtcatttgcaccatcaatattgaccgacttatatccttgcctacgacaaccttagcgcggacatcgtatcccgtggttagtttgataaaaatatactcactgttcatgtcgccggacagtcgaattggtcagattctcgacgtgcagagtctcaaactcgattattatttggacaaagtcatcgcgcattaccgtgccgccgctgcgcgcgatggtggccgtgcagcagcgagatttggaaacataatggttctgttgcgcaattggtttatcaagaagcgcgaccagggagatcatggccgggaattgaaggaggtcttttcgaatgatcagaaatcctccgatcaccggcaggcacatcataaccctgataccccgaacgcggtatctaccaatccaagagcgcggatagcaccgggcatgacacccctccatttcctcagcgaagtagccatgggcgacccagcgcaccgagcgaacaattccaactcccaacgctcgatagccggacaatcttattcctcaaaccacagtccaagctcaacagtcaacccaatgccaacgccaagctcatccaatttcgtgccagatccaccccaaaccagctggtcatctagctcatcatacccaaccactctcccgagctcagactcgaaccatatcgagacgaggggttactaccaaccctatccatccaccgaaatcacacagaattatccagatttaccatcgagtacccagactcagggataccctgacatgtccaccgtggctggagtgcagcttgctcctccgatgggaatggcacccgaggtaggcatggacccgaatttcggtgatccttggtttacgttagggaatatgatggacgagggactgtttacattccctctttcttttgacgggaatttcggattgttttagtcggcttattgtggtgtcctgtctcctttgctcattatacccgttgttgtttcgaatgtatatcaatttcactcatcgcaagatgcatcatcttcgagggataggctcggagggaagccatgccttttcgcattcagtcactctcgtaaggggaacaccaaatctaactaggattagtgaattacgaggaacacttcatctaggcagtaagagtaaggcttattccttaggaatagtctagtgaacagtataacggcaagcaatgatttcctctgatgtattgagaacgagaaacctacgcgttctcggctacggagatttacacccctcatgtattccgtgggactcgtcaaatggcaannnnnnnnnnnnnnnnnnnnnnnnnnnnnnnnnnnnnnnnnnnnnnnnnnnnnnnnnnnnnnnnnnnnnnnnnnnnnnnnnnnnnnnnnnnnnnnnnnnnnnnnnnnnnnnnnnnnnnnnnnnnnnnnnnnnnnnnnnnnnnnnnnnnnnnnnnnnnnnnnnnnnnnnnnnnnnnnnnnnnnnnnnnnnnnnnnnnnnnnnnnnnnnnnnnnnnnnnnnnnnnnatgcagacctacatggacctcatacatatggtaatgtcatggtccctgtggtaggtgaagcaccatctgctacagtaccctttgcctgcgctgtctcatgggggctacggagggatggtggtcagagggatggggagaggagaagaagaagaagagaagaggagaaatggggggaggggtcattttatacctcaagcccatgtgccttcctaaagtgcgacaggtccctcgcaccttccctggcaatgtcaatgtcacatgtcacccatgtggatgatccgatataaacatcccaggttatatcgacatcaacatccattgaaattcgtacgtctcggagaattgcattctccgcggctccgtacactttcagcacagcttcgcaatcaagatctactatacatcccacattccaaaccagagcaataatatccgagaagagcatatcctattcgtggcctgcagtcaatttgacctgcctccagtcaaaatggcccctcatgaccccaaccgtgtcgctagcatcatgctctcatggcactcgctcgagctcatctcgtgcaccaaccttcaaaccctatgggccgggtatggacaaatatgcgctatcacagcgcgagccaccacctcccaagcagccgaacatctcagcaagctgtgcggggtagagcctggtgttgtggggacgacgtatccccttatcctgaaactcatctcaccgccccgaaaaagcgccagcactgcagacgagggccatctacggaaaatgctgagctacgaggtggaacagtacttctatagcgaattagtccctcagctgagctgcaacacagccatagccaaatgcgttgcctcgacgcgcgacatggactactcggcagactcgtcggaactcagcggtcttatggctacgatcatggttgatctgcgtcctgagttccccatcgcgggtgagaagagaggtgcgctgaaccgcgcacaggttcgcgcagcgctagactggctagctggattccacagctgctcaaggaaactactgccatctagtcttgacggatatattctgccgccgcttgaagaacgcaatagaagacagagacagagcccagacaaggatgttggtagcgggctgtggctgaatggggggtatacgtacctcgcaacgcgacgtaaagaatacgcatctcttgcacaggacacggactcggagtggtcagatgcgctgtgcagggtatcggaagggtgctcactatccgtggcggagatggttgcattgttcctaacgccctgcgggagggcaattgagtcttatattcatggcgatgtcaagtcggaaaatcttttcacgactactaatggagacaaggtggccttctttgacttccagtatgtcgggctcggtttgggagtctgtgaccttgccaaattgtttacctgctcggttccgctgcatatgctagttgatggaaatgggagtttgcccgcacagctgtcaatgtgcgatgccgaaagggcactgctagagcgatatcgtatgagtctcctccaagatgaggaatcggaggagtcagagctatacgaatgggaagcgttcaaacggcactgggagacagctttggttgattggtgtagattccaggcttcgtggggattttgggggaatactgagtggcttggggcccgtgtaagatcaatcttgaatgaccaggagtggagagactggctgtatcagaatatccgtggtcgagtgtaggatcatataaatagaaatgcactgtgaatatatcttcaactccatccagcttttgaatagtgaaaatggggagatcagcggttatttgaccttcctacttaccagttgtttgtatgacttttgcttgatgattcgagataggtcctgtttcttatgctgtcgcagaatgaaaatgtagtatgatcagattggtggagctgcctgagcctcacagcacgatcagcgcctaagaacaattctaattggtctatatcatattatatgtaaatcaactgggtatataactatatcggcctccacgcttgcataacctggttgcgcatatatccccacggccagccgttttccctttcagttcgacgaaggaggtcaatcagcaaagtttgtacaacagggtcttccacccatgagccgcctgtaggcatattagtaaactctccctcatagaatgcgaacaaaacatacaggcaaaaagtgcgtgacaagccgtgatacgcagtgaagggtcgtcgtcggcagatgtggcgatgccgaacataaaattaagcgtttcggccagatcatgctgtcggagtcagcataaaatcgaggtgtttcaggggggggggaagacaaacccttaacttgacaggctgctctaaatgcaacatactccgatcataaaactcaagttcgcgaatgagcaccaacgatttagtgagacagatgtgctggaccgcagtagctagatccaaattagcacctcatccccaacgcaggcttatatcacataccatgccacaggctcgtataccacgcaacaggaaaaggtttcccattcccaggatccgccggcgagatatgcaacggcacaaacgtatccggtcgaccaagctcccactcaagaatgcggtgcctgagcgcagcctcccccgcactgccaagtctaccgtcatggcttcggccggagatattataacagaaatcgatagtctcggccaatagccagattgcccggtttgtccagtctccgtcgctcagggcaggtttggcggcccaccatcgtcgcaggcggtcatcgaacggcgcgaatgttaagcggaggcatttctggtacgtgagcgcgaattgaatatcttgaatgacataggcccagaaagaagccgatgccagtccgcccgagatagctgagtccacgtgggaactgatgtataccgaaccggccaggagatggtgttgttggtcgtttgggggactatgggctgttgagtgcgttagccgggggtaattattttgcgttgaagattggtgatccacgcacaggagattgattcgaaaaatcgtagaatgacggttgacgagaggaggatgtcgattccgatttcgaactcgggcttgtcgaggaccggcaacattattgagatacagcgctcatgatatccgtgtgcgacatcgccggcgatggagttggttgttcgggataggtgacatgctgagactgcgagacaagcatacagaagtaatggggattgggtcgcgcgctcgatgacatctgttgagaagtgtcggtcgggattgaatgcatcgagctgggctgttagtggaaaggcggcgaatgtgataacagaccaacttacccacggcgccaggtacttttgaaaatgtcgcaacagaaaggcttcagtgacattggatagcctcgggtggccaatgggcgtgggcgtggtggttgcacgtgacgaattcccagaattcgatctagagcccaattgagatcctgcaaaggcaggaaggacgagggttggagttgccaatgaataatccatcgtcgatggaggcgtggaattttcagacgatgaccgtgaagtcgacgcctgccttgtcacaggtacaacatagtattccgctgccgtctgatctgtttcgtccttgaagtggactacaagaaatcagtataggaaacagacgcggagaacattccacatacagctggaggacgtttcaacccagacctggtcgtccgggaaagcaagatcactctcgccatatcttggaggcccctttcgcaaggatgggttctggccgtgtcggaaagagatctcttcagatttgccgggggccggcacacattcgcgaccagagcgttgacagcggagacatttcgaaccggatttgtcacctaattctgttagtgccgagagcagagattcggagtaggcaacgtacatttcagatggcgcagacgacatgtgaggctgaaacgacgggttagtcgaggtcgagtacgcgtaacgaatcacaagaactgaccatcccctcattacgcagtcaaaaagtacaatcgcaaacaaggaaatcttccagaaagcatatttggaataccaggcccgagggtgagatatgtaaatagggtaagtcggccagtccgactatcaaactcaaccatgatgtctattgggagactaaccaacgcccacccaggcgagatggtgtggggaccgaaaatttggcagatcactaacggattgcgtattatttttggggtttaccagcggctacgttttaattggagattagttcgaagagcttagagctaacagtggttgaaatgtcgaatagcgggtttcaaatgtactggaaattagctcaaaccatatcccgaatgtggaaacgttcaatatccgagctcatcacgggtctgaaaaaggtccaatttccacgggagtctaggcagcctggcgttggtcgtggttgggcggctggcttccccacatatcagactaagtttcatcgaaaagattctgatcgtttacctaagaaaagatcctgtgacatgtcatggaagttccggaatcgggttctcggcatgatagttggccgagacattggaagttgcactcggtacggaggagtttgaccgggcctgttttatcctctttgcctcttttccttttgcctcgttgccgtcaattgtgtctgcaatgtagagaacctattccgaaagaccccctcagaaggtatccggacataaatcggtataaatccggggctgattgtcaggtcagaacttaaaacctttcaagataaaaagacaaagcgttcgacaagcaacgggaacgaaattagaaacgaaaataagaacgaggttagtgttgaagtcgttcggggtctcctttgccgattggcctcaccggtcctggttcaggcaccgtacggtccagccacatggtacggaggaccgacatggatcactcacagggaccttctcatcccatgacaaggtgcgccggcaatctccgtgtgaggtaggagtaccaggccttgatcaatcctggttgtcggtggatcttcgatgaaaatgagattttaattccaaacccgtggaaaccctgtcgatctcagaggcacttcaatatgttgtacgccgaacagacgatcccacacctcccgatgctataaagttaaaaacggtccaaacaccagacaaatgggatttgcatatgtggggggctttctgttaccagctgcctctttcggccaaatgctccggggcgaaaagccacttgcattattcatcatttgatcagcaccagaagtttcaatccacggttgaattggagcaggaacaggagaatgaactgtgtggggagaggaagagagacaagagagaggaaggagagtcatgtggtgcctgaaattggtgcctgaaactgatacctccaagccttgaatccaaggcatccatgcatatcccaaaccaagctattccaacttcgaggtttcttatctttggagctccctgctggtctcgtagcccctgaaaagcttgaattaaacaactgtttccgttcactactgtggtgaaactgagtcaatcccaaaatataatgccaaatgtccctaaatcgcatctccttccttgaaggatgggaacgcaaccccgcggccatcctcagccaccctggatcggaggattcggaccccgactcctaccaggatctgcccgagggatccatttcatcttcatttccctccacatacagcagactgaatttcaacccgtatgcggggccaggctggaatgaaagcccagaggatccacacgaggatcgatcctcgtttttcgggccctcatttctgggcttgtctccgacgactacccccgaaggacgtgcgggtccggctccagtgccgggactgggatctgctgagcggactgcgcatgattcagagacgaccgttgctcgcacgccgccttgggcagatactactggtgcttatgaagtgagcgctgctaggaggattggtaggttgatcgaactcgcattatacttcttttcatatacagtggcatgttaacattataaaagcccaggtttgcacggcagtcgtatactgttttctggcggccggggttgttttcggctttgcagctctcaagcccatccttattcgagagaaagtatatcgcgacctctgctcccaggcggaacttgagaaagatgtcgatgtatgctatgggcaagagattcggtatgtttcccccgtggttgaagatcactcttacttacacgcaacaggctaaacttgatgtttactatcgccgctgtagtaaccaatgtctcagccctacctgtaggcacaatcctagacacgtatggaccacgagtcagtggaatcatcggcagtatctgtctcgccataggagcagtactttttgggacagccaacaagcttccattcgatggatacatcccgggttacttattcctagcactgggcgggccattcgtcttcatcccatccttccatctatcaaatacattccccaaacgatcaggcctgatcctatcaatgttgacaggcgccttcgacgcttcgagtgctctattcctgcttttcaggttgttgaacgagcacacgcatggcgtcgtatcaatcgacaatttcttcgccgcatacctcatcgtgccggtattcatcatcgcagcacagatcttgataatgccgtcaacatcatacaaaaccgccggcgaactcgtgcaacaagccgaagcacaggtcgtagatgagatgcgcgatcgcatagatgacacggtcaatgaccgcagcgagcgcgagcgccagcgtatggacagacgactccgtcgccaaagcatcgtcagccagatccaaggtctactagatgatggcacagcatccgtaatgtccggcaatggcatcaacgactccatcttccacacgaacatcgacgcctcgctcgacgtaaataccaccacaggagttcacgacactccaacaccgccctcccaaacgcaccaacaaccaaccgctcctcatccaacaccaggcggaatatggggcgtgctccacggccatagcgcactgtaccaactacgcacaccatggttcgcactaataacagccttcactgttctaatgatgctacgcataaattactttgtcgcaacgctgcgctcacaatacacctacctgctctcggccgagaaagccgcacaaataaacacaacattcgacattctcctaccagtcggcggactcgtctccgtgccgttcatcggcacattcctagacgtattccagacgcgcactgtgctcttcatccttgtcgtgtcggcgaccgtcatcggcgtgctgggctgtataccgcatccgaccgcggcctatgggaatatcattctcttcgtgctgtaccgaccgttctattacactgctgtatcggactacgcggccaaggtgtttgggtttgcgacgtttgggaaagtctacgggcttattatttgtcttgctggtgttgggaattttgcgcaggcgggacttgatgcgcttacgttgagggtttggaggggagatcctgtgcctgttaatgttggacttacggtgctggttgctggggttggcagtgcacttgttgggtttgttgcttatcagacgagtgttttgagtgggaataagggtgacggtgagcatcatcaggatgtcagggagagggagccgttgttgaggaatgaaacacctgggagagtgtatggagcttgatcttatgggcttgatatgacggaggcgccttgtttgtattaagtatctaagaatgattatgaatgtgaatgtgattggatatgaggatggcacatgggagatttaaggatatttagggaaatcctacaagcactaatacgagaggaccatagcaatgaagactggaatatgaaatctggagacgtgaacattagaacgttatgtattatatctcgaatggttgctacccaaatagagatgtactatatacagatgtacccaaacatccaaagacgacaatagggcgcgaggaagccacagcctatgccagggcatattataatccagatccagacccaagagtggatctattatatccagtgcaatccaaaaaggaagaaagagtagtgcccgggcccgggagtgtttgtgacagtgttcgggtttcacagcacggcgagtttaggcaggtttacgcaaaatcgatatgcccagtgggtatatctatgtatgccccttgtccaagttaatatcgctggtgattgcgatgatacaagcccaatatatttttgtatgtccatttcaaagaaaaccgaggatgacaacgatagtgaaaatgagattcgaaggacggtgataagaaggctggtctgcgtcattgcagctcacggcagatcctgggaggaagcgcgtgtattcgcgcttcatgaggttcggagagattcccaatgagggaattgggctgctcattggatggcatagctatatttactagcgccctcctgccagagatcctctgcagcgcggtcacaggcagcttcgtaccataacatagttgcgaggacggatttgatgctggcccatgaattcaagccagtcctgcgagttacatctcccagagcagaggcaaaccaggcgcgctcgggagcatcgttcgctgcgataccgccgagggtcaggacccagatgagagggacgcgtgtggatggtgaacaccacagctctgaggacgagggtttgaagaggacggcctgtataaggcgcgccagggtactgaggggagtattctgggcggggattgggaagagaacgccgaccccgaagattagtgccgctagacggcaggcttcataggtggcggcacgcgtgggatgagagaaaaaggtggaaatgtctgaggctggagagagggagaggagggtatgttgggtcaggttacgctggtcggcgagcaaagaggtatctggtgtgaaattcaggctcgctttaatgatcccgatataagtgtgcaccgcttggaaggcttctgccatttggtgggtggcgccaatttcctgcaaacggccgaatccctggtcgacgtctgatgggccgaagccgagcatttcttggacagaccagcctaatcgggaatcggcaaggggccagaaatcgaagcatgggtggacgcagaggacgctgcagctcatgatatccgagctatgagtggtcagtaagggcagtcagtaagaaaccaaaaagaaccgagacatacaaggaaattgtcgcggcgagaccctctgtggggatatttggcaatccacctcgcagtttgaccaactgcaacagtcctttgatatggatcatattcggtggcagacagccgtagacatcaatccattgtagtcgcaggaaaggcggattaaacggtgttctgcggtgctgctgtaccaatttctcctctgcctgatgatgagccatgcaaatgacactgaggagaacagcgtcgctgaccgcgcgatcggggtcacgaacagcctggttgatcagcttgatcgattccatttcacacagctgcagcgcacgacgctctctctgaccaaatacggtacccggcacccagttattctgccattgtacacggaggtgacacagcgagccaaacatgaaggctgtaaataaagccgggtccgccatggacagatcaaaccatttattagccgcagctctgacattcagtggccgcggagcgagtcccggccacacaacacccgtaagatagcgctctgacagattgatcatctctggctcgaagctcttcggggcggggtatgttgcaaaggggtcgaagactccagagaggttgcgttcaagccgctcaggagaagagcgatcattgaaccggatgacagccagcgcctccgaggagaacgtggtcacggtactcgcatcgtcgctgctactgctatcactgctatcgctggcctgtgatggcggaaacggcgagtctcggtatgcagcctggttggagcgggagttgtgcgcaaaggtgaattgaccggggttgctcccccgatgggagctcgagggacgcgagacgagggtataggagggaccgggaccaggaccgggaccgggaccggcgtgcgcaacggcgggtaaggcgcggacaggtcggatgcgtgaactggatgattcgcctgcggatcggtcctttgtttctgaaatccagcgtccgacatgggcacgcaccagacgctgggctttcagtcgttcggtctcggaggcgggtctagcattgacaaaatgaatgctatccttcttctgtttctttcttgacgacatcaccggctcggcaagcggtgagagatatatgtaacagctagatcctgcatgatctttccgaaggggaaaagaggttgaagctcaaatggaggtttaaacaaggtgatcggttattgatattgacagcaaagccctatgtagatcatatcagacaaatttgacaattttttgtgacttttgacagcctcgaagatgtttgggagtggggaagaaaagggtaaagaggaagaagcttgggagctcccgtgaccgcagatcaatcgcgtacttttacttttatgatactccttttttattatattcgataattcggttctattatttgcttccaggctctgattcaaggattctattactagtacgtgcattctgacagtggtggagtcttctgcatgtgtatagtgactctatattgcacggagtattctgatctattctgtctgaagaggacctcctttcatagagctcaaggaaaaggactccgaatagccgttcaatacgaagtcgatcctgaaataagattgccaaacagggggttctcctttcaatgttcttgggcccagtcattccccgggaatcctagtatagtggacacatagaatgtcagactattgccacagcttcttttatttccatggatgctatgacactcttctacggtacaagcagtccccgttgcaattctatatcccccgcggtctagatgtctttgttcgaggggaattcctattacaatccgtggtagtggcagggtacgttgaactgccatatcactacattattatatacggagtgcgtcaatgctcgacggaaatatgattcccacggggtttgaccttttttgataggcctatggaaaagaagggaaaagaaaagtggctctgataggtgggaccccgtcgatcgtgaggttaatcatcttggagtggcaattccagtgaattcgacggagtaagtctatgttgtagatacttggaaatactattcattatgtctgatatagaagcacattgtaattgaattgttacatttagcctctttatgcaatttacatgctaacctagtctttcttttccacgtttgccttttccccatattatagagcttcattgttcctctgatgcaagccaaccggaatatgagacaatacgtgcttgattatgagtccagtcagcggccttctggttatctacggaatactccgtattccgtactccattcacacctcgagtgacgagtctcctcggccgaaacggctaacaatcactatgtattcctcctagtgaatgcagaaattcctttagctacaatttcccacctgtaaacaccgtgctcggatccgctaacccgcagtttgtgacagtaaagccccggttgactccgacgtcccctcatcttcagtcctgccgtaccgaagatctgcaggaagaatatacgtatagcaccgagaaagtacgtgaagaaaggctagtggagaggtctagacaatacacagctaatcagcgtggggtttgacgcctgacatgagggatatatgatatgtgatggcatggttagggttagcgctgacatcaggtagggtctgcatcgactaagactcaggtgacaggtccactggcattggcccgtcgatcgacgagaacatattaatatttagctagtccgagtacggagctggaaaggatgtgtgtggggatataaacgattgaagtaagaaatagcgaattgtcgagttcacacaaattcggcacgaaaggcctttcccgtgcagatcgacgagaattccgtgcagatcgacggagacgaaaacccaagagaatccccacagacatgtcaacaggccccccgcatatcaccacgcatagcgccgttacactgcatttatccccgtcactggaggaattggagctgtcgagaaaaaaaggagagagaattaaatattcgggaagaacggtgaactcgacctcgaaggatttcattgtctcggctccgacgccgctaagaacccaatcatcctattgacagcatacgagactataccaaatacgatctagctacatcactggctgcatgcactaacggggggataatataatatactccggactagtccggaagatctccccatcgaattaacgcattccaggctagtccaacttaatcaatttccaacagggtataccgacagctctcactggtctgtggatcatggtactgctctaacgccttctccacagcagccatgtagccaaggacatgctcctcctcccagcggcgaccgacaacctgcacggcagtggggaggccagccatcttggccgagtcgtagtgtttccatgcacctcgcgcgatgccgttgtcacagcccagacgctggaggacggttttgtaaggtgcgtcgagggcgtcgcggatagggtctacgtggccgacagggatgacaccggaggagtagtcgagcaagttccacaggaaggtgtaaccgcacgaggagacggcatcgtgcatggccttatgcgggagagccggggtagcgttgacagggcacagaatgaaatcgaattgttggggctcggcgtcccaccacttgtgccaggcggcgcggaacgcttcgcgctgggcggtcagggtccagacctgggcggaggacttggggccgaagtcgcggatgagtgtggcggtgaccttatcgcggcgaatgtagcgcacgtagaggtagaagagatagcggagtggacgggggaggttagcgacgcgggtgagttggatggcgcctgggtcggagggttcgaagctcttgaggttgacgttgaagtgatggcagccatctgagttgagaagttgcgaggcgagattcagacccgtgaaggggtctgctgtgggtggggtggtgatttctgagactgtgtggccggcttctgtgagcgcagctaccgttgttgtgatggcgcgcttaatagccggggttggggggacaacacctagagatttgtaagtgggctgactttgactatcagggtgagtgtcggtacataccatcggaggtcatcacaccaatgcgaagaggtttattttgagcctcagactcgacctcgctgcgccaggcaatggggtgcacagtatgctcatatttccagggctccatacggataatcgcacgagtgaagtatgtcaaatcatccaacgtacgggccataggactaaagacactaggaatgccctcctggccgggcatgctggtgttcacgccgcccttgggccagcggccggtgctgcagcggagcgaataaataccactccaggcggcgggaacgcgcaccgatccagcaacatcggatccaataccaatgcggccaccctgggccagcaatgctgcctctccaccggttgacccaccgggcgagtatgctggaacatgtgggttgcggcattgaccccaaagcccgttatctgactcgaaagagagcagggtgattggcagagcagtcttaacatatgggacagcgcctatgaaagtcagtatgtaatccagctcccaacgaacgtgtcttaagagccataagcttaccggcgtcctttaagagcctcaccataggcccatcttccaagataggctttccagccatagcagcatatccaacagttgcatcaaatcccttaacgtgaacggaatccttcaaagagaccggaataccagccaacggacccttcaggttgatttctgaccccagccatgactcggcctcgggcagcatcagctcggtgacgcagttggttcgctcatgagcccttttggctacctttccataggtgcggaggacatcgagtgcggagacagtcgagtcgtggacatcgtgaacaagctccgcgataggctggtcgatagtcttccggtcctggtcggaaatggggagttgatactgttgcggaagacctgcaaagcggagttctcgttcgctttgtttttggttcctgtagatattagccccggatcatgtaagctcgagaggagaaaggcaagcttaccgtatgcgacggtaggtgaagtagtcaaatggaggaagcataatgtcggtgtgatacaaagaggagaaggagggggaagatggggggggttttatacgatgcggagaagtggagaagtggagaatgcgatatgacccggctagacgggtagcaccgaggttagccgtggacaccaaccctcagggctgttttgattgtacagttatatctagctatgtcgtacggaaatgggcaatatgtatgtagacttactttatacttgggtgaggtctgctttgatctcgaaaccctcaaaatatcggacaaatcaccgaccaccagatgccagcggcaatttctccgcagaaaagataaggagccactgcccagacacgctatgcctattgtggtaagtgcatgcgcctcatagattagatgccatagatagacgagataacttgatgagatagaggattaagattgtctatggtatgcagttctatataaaagctatctaagcaaaatgcccaacgccgtatggggggcgggtatatctccaatgccatgcaaactccagttcaacgccaaatttcaaatcaaatcaaaaacgcttcactagccaaagccggttattgagcagtatccggacgaggctggagccagttgttcttagcaagccaccatagaaccacgctgacaacgatgacgagcacgacggcgaaaaaaatgatgaagccgcaaatgatcgaacgcttgctcttcattctttcgcgggtaagccatgatgccctacagggggtgagttgaggttcaacaaatgtattggagatgagggtatcttacgcatcctgttttgcttgtgcccggtcaattgcttttgactcttcgtccatgtgaactgcagttgagaaccgtttccagaaatatgggtctcgaacaagagccataatgatatgctatcgaaccgaggtggatgtgttggtggatgcgttggttgttgcgtggtgtcgactggatgactgaagggatagtcgccggaccggctgagaagaaaacaaccactgatgtatgaggatgcaattgtaaatcgagtggtgaaagtggtgtgggtatgtcccatcaatgaggatgtcaatgtattcgatcgaagcagtgagttgaagatgggacgcacactgattcaacgagtagagtagaaaaaaaaaactttaacaacacgggctacggatattagttgcgcctatcctctagatagaggccttagcgatgaaatgccgcgtgtggaattctaaccacagacacatgtacatactcacccgagggctggaataccaatcaaaccacgatcgactgcctatccaattgctgatttgtgtaaaaattcccaagctcaggccacggaaaggaaaatcaaggcagacagatatttcgaggtgagaatggagttctggtattggttcttaataataatggttgtgactgaatgtttgttcggcgatggcatgccgatcgcggaatgagagattcctcggtggtggaattgttgatcgctgacattcaagcgataacattggtcgatgataatttaggaatgtgggcctgtattttctaacagggattgatttgataggaaaggacattatggtagaggctgaagaacgggtcgtatgtatttgatatcgctctccgaagctgtttcgcgtgggtaactgatctatagaccatgttgcaaaaatctcgactgggtcatcaaccggtatggatgacctaccccaagcctttctatgtactcgatgtagtgacgttgccaataaacaaacagaaattaggttgtagcgtcgatggttaggtatgtaggcagtgaaacgcaagcctcaatcgatgcagtgaagatcgtgctgccccttccttttgaaacttccagtctgttttgattccgttattgagtgttgataccacgtagtcagaccataaaacttgtcatgaaccccatccagaaatatcagtcagatctggatagtcttgccatgcgtcagcctatagaaagtcatcgcgcgcaactgaaatccggcgactaggtggcaactagcccaaataagcaggggtcaagcctaagaacgatgtgcaaataagttgacgcgtccgtattcgttgactggaggctttgaaagtaaacatccgatggttaagcgcagcagggagcgcagcatccctatgaaccgagacgtttctgttcgtagttgataaccatcattctttcttgggacaaggatgtggagagagtaagatgagaacaaaagaattggttgaagtgttcgatccgatagccctccagctccagggctccagttttgggtgggaatagcttcaattcaatggtttatgcggccgggacggttttcaacgctagggattcgaagaaagggatggtttgtagggtaggaatagcttcaatttagcggcgtcgaaagcggtaatgtaattcacaagcgagtgacgcacacaagcgagtgacgcacatcctagcttagagggagggttagtatttaaagataaatattaagctttataaggatctaattaggtaaaaaaggtactaaactagctactaagaagctatttttaattatctctaatttaaaagctttaatttatataaagggatatactttaaagaagttaagtttattaatatagttaatcctattctatatttttattttaattaactaactatataactactttaagactataaaacagccgatattaagtagttataaaaggtaagaggaatatagtagtatataaattagtataatattattttacttataaattttattaaactttagtattaaatagcttttatagctattaaatactaaaagtcgataccttccctttatatataaagaagttaaaggaataaagagcttttaaagctagtaaagcctaattttattagaaatctaactatttagactaactttaaaatactaattatttagaagcttattaaactaagatttaataaagactttacccttaaagattatatatagagggagtatctacctagaagtatttatatatttaattatagttacctacttataatttctggggggggggagccctgagttttatatagcccgcacgttagtaaagccctagttcttagctgtaaaggtagcgaaggccttcttcgctgagcgcgggggggtgcttcagctacttccaccggcgtagtaatcaattaagaagcttcctaaacggagaggccttcttcagaaggtatctacctctgggatctagtatgcttttacttctgcttctcgttggcagcctgtaaatcgcttacttctttcttaagaagtgcggtagattgtatagtaatctagcaggcttttaaaacctggttaatagctgaattaagcgggctcggagggcttcttaatcttatataaagcaatgctttaattgataaagcttacttttataattaaacgtagtttaacggtgtttttaggtcctaatcgctatcccagcttagggggggagttagtgtttaaagacaaatatttagctttaaaaggacccaattaggtaaaaacggtactaaaccggctgctaagaagctatttttgattatctctagtttaaaagctttatttcgtataagggggtatacttcgaggaagttaagtttattaatatagttgatcccaacctatatttttaatttaactagccgactatatacctactttaataccgtaaaacagccgatattaagtagttataaaaggtaagaggaatacagtagtatataaattagtataatattgttttacttataaattttattaaactttagtattaaatagcttctgtggctatcgagtattaaaagccgatatactccctttgtataagaagaagtagttggaataaagagcttttatagctaatgaaggcctattttatctaatatctacctatttagactaactttaaagcgctagtcgctaggaaggtctttaaactatgatttaaagaagaccttacctttgaaaataatatatagagggagggcctaccccgctatatttatatatttaattacagttacctactcgcgatttctaggttataaaagtaatctctaactatagtatttacttctagttataacctttactattatagttaatcctatagtaaaacccgtcttattaaagttataaatattatctagatcgattctatactaaagaatggttttttaaactagattaaaccactctctaataatccttaagtctttatatttcgcatactcgtaattataatatcttaagaattaggaggaaagggtagggtactgtttaataaagtttgtaacccaattttcgccaactaaaaggaccggggttattccacagtattcgaggagaatattcgccatttctcgtaccgaagagggccacggggctgaactgcgagaatccatagagagaatctatttctgaagagattcctcttcaatttctgttaatttatgcgagttggcgcgagaagtcgcgcggtttgtaataccgcggagacggcgacgtaacgtagtttcaggcacgtcgaaccggcgtgctgcctcacgaatagaactgatttcttgactcttaatagcctggatagctaacaagatcctgccttcttgctctattgaattttgagagcttcgagagcgaattggtggcatggtgggtggttgaattaactaagtgctaaaccatagacgcgttttaggtggggtgcgtcactcgcttgtgaattacgttatgtgattcaggcatattcaggcacaatcaggcatccatggatttagagcttgattatgtcatccgatagtcagcatgcatcgagaaagtctctcgtttccctgtcgctctgcacttggggtttagattaaaaagtgagaccaaatgcttcatattatagacgaaactacgaactctttgaatgaaaaccgaaagtagaaccgaaagcgatcgccacgacttgttcagctatgctctgcaaagctagatctagcacggagatttgcaccggaaaagtagagaataaacatgccaatctggggtataagttaacacatggaatgtaccaaattgtcgcataggagacttacaatccctaagatactcaatccagctaacagagtcacccccttctcaattccaaggtcaatgaacatgaatcgagagaagaggatgaacgcaaacgcaacaccagatcgtgagatatcatttccggcaaacagagaagctgcatacttcgggtacgcaagcggcaggtatacagatacacattgcaatataatgaagatagatcctgcatataggacaataccgaaggcgctcacagcccaatggatagttccgttggtagtccaggctaaacggcatgaaaattagtctctgggttcatattaaaccgccgccttgaacggggtgcttctgcttaccgaaaataaaaagtccggccggtggcccgaaagaagcgaatagagcaggggccaggcgatgctcgtgtgcacgttggccgttggcttttagatctggcatgagacgggtatgaagataaacaatatagacaacaattgcaagcccacagccgataataatcgagataaagattagcgcaacatccgtagcatcaaacccatatttggccggataaaccaacggaaacgcttcaaagaaggagtaatagattccataaatgagggatgtatagaaattggcgaatagcacggctgggtctttgaccattatctcgacgggttttatcaggcaatcaaggagcatgtcgcaaaatgattggctgttctgcacaatctcagaccgcgagaaaaggttcgagttcccagtaactttgcgtagtcgccgtgcgcgacggaggaggatattatcggtcgatgtctctggaagacagacggtcataagaacaaggatgggtgcactcagccaaagaatttcccacatcgcccaccgccaactgactaatagttagccactggtatgatgcatgcaatatcgattgactcacccttttttagcgattgaaaagaccgacaaaaccggaccaagagctggtccaccgtacgcagcagcaacccagctggtcaatcctagcggtaggtagatatccgaatactatagtccgatagattgtcagttctagcagaggaatacaccctcttacactaaaaggcattgttgcacgaaccatatctgtcatcgaggcaccaccacttgccagacaagggcttccgaaaaagccctggagaagtcgaagaaccataagtccggtgtagttgtccaccaaagcggtaggaacacacagcatgacaaagatgattaaggaggtaatatatgggatattgcgaccatacaatggaacctcacttaagggcgagaagagcaacggaccaaggccatctgtaggaaccgaagcgttagggcttatcctgcgagagatatggtaggaacatacagcctaatacatataatgccaaacccaatgaagccttcgtttgactgacttggaagtgttccattatctggctgttgggtaattagtcgccatgaaagttttgttgttggattgagagcttacggttcagctggaacgtagattgaggagccagaatagatggcgaacgtgtacaaactgtcaaggcttagaaaaactgttgtgtgagcatagaggtaaaatgcgaggtggtctgtaccatatctgaaaggtaacaaatctcttcttccataacgaccaatttctcgggtttgctggatcgtctggtccgtaccaatcgactatattctttgtctcatctcgcgtgtgtgctccatccgaatttacatccggggggaagtctgaagtcagtgctggggttataatagagttgccgtcgagactttgtttggactcaatctggtattttgtctctgccgacttcgatggaacaaatcccggcttttcttccggataaagtagaatcctattaccggtgatttctcgtaaaagctgtcccagaggtgactcgcgcactgtatccatatcttgcccagagttgataatatatagaatagcgagatggatcaaggaagatggttagctattaaataaaatgagataatgatcgtcctagtgcatatcaatcacatcaaatggtgagtaggtagggtttacaatgttgtacgacgcatgcaagccaccgtcgtcgaggcacatccgggaaattagagtaaacaacccccttgcatcgtctacaaggctcacaaacccacaagtctgcagtgttcggcactgttagaacttatacaatagggactctggattttatgaatagtcttctgaatattgcgagtgatttgatcttatatggaaatacaatctcagtgtgatgaaatcgaatctaaaatacgatgatctttccagatcaaccaataatgtacttcgtgtaacacaccacacctaccacacctcatgcgtgcatacataactatgatgttgaatatttatacaagccaagcaccacctttctcctaatcagctagctcatcgtatgagacgatcccaattgggtcactagcacattgcactataacagccactagatatggactgttttactgtaatgctgtaatgctctgttgtaattcctcctagtattcaggactttcctaccgggaagccgtctaaatcatgacttagttcatcctcctcccagtaactattactatcaaatcgtagagacagccccatggccctagactattcatgtcggatatttcacgcgctaatagccaatatatgcccctaaagcatggcgtacgtgaatctgcatacttggagaaaataattgcaaagaaaactcgaattttgctccaatttgttagctttgttacgttgttaaaacgtttgctcgccccaaaatcaaagcttagcgtgttgtacgcttaaactaccggtggtaaataaaaatcatttcctttcagcaggagaatctcgttgaaaaccccaataagacatctctgagtcgtgccaagtcctttggtctctgccttctcctgggccttcctcaataatcaagtataggtgtaggtctggggaccactggtgccacccggggttgtaacagtcacgggcacggcgccaagcgcgacgtgcggaggcgcaacagcagtgatagtgccgtcatcttcaacggtgaatagggctccagaggtatcgaatgtcactgcggtagcctgagtaaatccggacccggttagggttacgttattacccccaaggcgagatcctgtggtaggactcagcgctgccagagtcggagcgcccaaataagtgaaaggcacggcatcgctaaaagcagcatcagtcacgacggtcacaggagccagtccggccggtccaggaggggaggtcgctgtcagctggttgtctgaaatgactgcttgggccgtagcaggtgtggccccaaacagaacctcatttgtattcgacagacctgcgccgctgatggaaactgcagttcctcctgcagtggaaccaaaggccggggtgatcgaagatataatcggcggagcctcgaaggtgaaggtcagtgaactattggtccctcccgtagaggtcaccgtaattggtactgttccaattgcatgcgaaggtgtagtcacatccacttcagagtcagacacaacatttattgcggtaccagggatggttccgaatagcacactcgtagttcccgtcagaccacttcctgtgatcgcaacctgtgtacctccacttatgagatctgccgacggctccacagctgtgggtgcagggccagcaatgtaagtatactggtctcctgggttgattggactagatccattaggtgttgtaacaaccacatcaaccgtacccgcgacagtcgacgcggggactgtcgcattgagggcagtgcttgacaagacaacgaagaagggcgctgtaacaccaccaaatgtgaccgatgttgtgccagtcaaattcgttccggtcaccgtgacgacattaccgccgctcaatggtccgctgactggggacaaactcgtgacagtcggggttggagtaggattccaagtccaaacattgccagtatcagccgcactcgttccgcccgggttagtgacgaaaacattagttgtaccagttccaggcggagaaacagcattgatcaaagtgcccgaaacaatcgtgtacgatagagccgaagttgtgccgaaagtcacggccgtggcgtttacaaacccagttcctgtcaccgcaaccaacgttccgcctgtcgcagggccgttattgggattcagagatgtgacggtgggtgctgatatcgtagtgtatgtataacccccggtcagagtgctggtattgccagctgcatcactgaccgtgacgtctacagctcccggtgtcacggttgaggggacgaccgctgctaccgtgttgttggaaagtgctaccacgctagtcgcagccgtgccgccgaatgtcacagagttaacaaatcctaagtttgttcctgtcaatgtgaccgtgttccctccagaaatcgacccactggttggtgacagtgaggtgagactcggcaaaggagcaaccacatatgtaccggataatgcctgacactcaagacctttccctttccgttttagtgctcacttcttgccgctttttgatcactgagtaaaaatgagcacgtccctgagtaccctgacttgatcacgggcaattatataattaacgtaatctgctcactgagtatcacctgatcatcccctgagcaccctgatccacttactgatcattatctgagtatcctgatttgctcactgagtgctcactgaatgtacggctgagcggcctgagtaagctatatcactaaaatgcgatacgctaatcctatcacgtgtaaccctttccatttagatcgcctatcaaaaaaggactggcgcagtcaacgtgaccgttcatcctagcggtctcgaccctatccaagtgaaaacctcgcagtggggctattcaattgacccatcattttcccattccagcctatgctcctgggaataccctcggaatacttcgcttaccagcccggcgatcccctaatcgggctttggactactaccagggcgagggcgattggacggatttccttgattagagcccttccctgtatcaagacaactagagtaatcagtgtttagcaggtacgacgatgaactacttctctcgctaatgagcgtgtaagtcgaaggcgtttctgagcgtataatgtcatgtcttttgcgctatttctaagtaggttgtaaaccgaagacaaactatcaacagtaatacctagatgagctcctgcgggctcccaggagctcatcggtattattagggctctaaatgtctatagctatttcgttctaatcctaggaattctaagcctcgcccgtttggcctagcatttctgcctaaagtgatgccattttaaaggggaatatatatgcctagtcacttactccgaaaacaatagttttcatcattcctctgcatccgagttacttaaccaaaaaaaaaaagactgtttttgaatatatcacagtgagttcagcctttatacacacacacacacacaatttattaacgcccggcggctaagccgtaagggcaactatctctgatctactatatatagctctgcaattatatcacggacgtgatcttccacggcgattcgctcgtagttctcgagaccttgttcactgctaattggacggagaccgaaccgtctggcatcctcctcaagcgctatcaagggggtaaacaatcgtgcttgagcttcctcggttggctgcaggtagttgcacacagagctgtatattttctgctgtcgagctgaacaatcggtctataatgatagtcgtgtgggacagtattttccggtgggcggaggtatgctccctgtagttgagcgagacgatgtttcgactctcagcggtcgggaaagtaagctgtggcagaagcgcaggagttctgcaaatgcgttcgtcgattgcgctccctttgctgcttctctcgctcttgggcttgcttctctcgctcttgggcttgcttctctcgctcttcggcctgcaaaaagagtttcttgtaatcggtggggctggtattggccattgggttatcgaaagaaagagaggaattagggataccggtactcgagctagctggcttatcagctgatccggatttcggcgaaagtattgtccgaacgccgttgctgtgagttggttagacgttcagtacaatgggctgaaatttgggacaggcaagggacaatagttccgggcctatggcatgcaacccagaaccgaggttctgtagtatgtctgcgtcaaccacgacccggggacgcagtgctaaaactgtcgcacttggacctgattgtcgatcaaatattgtctctttttggccatctggcgtaactgtacaacctgaggaccgatagtgcatcacaatgctatcaaaaatactaaaggtatcatggatctctttgcaagttcttggaaagacatggcgtgatcccgtgtctgtcaaggatacacatgaagcatacaagatggacggagatgatctgcgcgggacccacatagtgtatatgggttccccggaacgcgaggaagctaccttcttttgcttcctcgcgctacgtcaaaagaaagtagcttccccgcgctacgtcttgtatctagagtcaactatagttgttctcaatattgattgttcatccagagacgctatctatctctatgtatacgtgggaccctcacatctcgcgaaatgaaatgcgggcaataagtgcgggcaagagaagaagaaacgattaacagccaccacgtagtcgagtcagtctgtgataatgagagcgccctttcccgtcccaaccatctttgcgaatcgcacctcggttgactcttgcttcttcaagcccacatccagctgcattgcccaaccacgtcagatgcgcaagtggcctcacagagtttgaaaggcaaaaccctcttcggctcaccatcgatgatgtgcgtctctaggagatttgtgaaatggctcatcacaccacaatagagataactccaatcagtagcggctctgtctctgctcgccttggccttgaacacaacacgctgtacaccaacgtcaatacgagagtttcgtccggcctccaagatgctcccatcaggcatgataggaaactcaataaatccagtatagtcacctccggcattcatgcattcatcagagaagtcaatgttgtcgctattgctgtaaatgtggggatatgcggcctttgcggcagtctgccagtccggttgaccagagcgcgggacgcccctcgcattggagaggaagtatttaattccctgcttcatcgcaccgagaatgtcggcgctgctagcgtactcaaaaccaagtcgggtgtcgcagccgatccattccggtatcttagctgcattggaaggctcgcccgggtctccttgaaagtccggtgcgcatgatgggggaattgcacgctttcgggtaatgggatgagtgctagagcccatatttgggttaatctcgcatatatcttcattggcttcaatgctcgctgcttcgctgaagatgtcgacatcgtctgttattggtcagtatgaacgtggatgaaacatgagaacagattgtcaggtatggcaagtctcataccttgtgctcttccaagtgatacttgcaattcgatttcagcgtagggctcctcaatgccttgaatcatcgagtcaacccggacgttgaaatcgtcctgccaggtggtaaaccatgaagtgaccgcttggaagttttcgggatccgcagcattgatcttatccttcaaatcactgatttgagtggacatggactgcttgagggaagttgctgaggcatgaaccgtagaatacagatccgcgggtaccgtttgcgaggcagtcaaaagtgacaaagcggactcgaaacacggcgtcccttgggccataatggcggacattccgctcgtgactgccgcggcatcttcgacaaggatgggcgtcggattccactcgccattagcgaggccgtccggcccgtcgtagtccatggggagatttgcctgctggccatcggcgctcccaccactgctgctgcttccactatcgctccctccgccgccaccacctccactgctgccggtgctatcggagtcaagatgatgttggtcagtagagcaagcgacgccacaggactggtcacagctttgaatgctgcaccctcctccacagccatagagaccacaatcatctaccgggtcgctcgagtcgcatccaccaaaaagtttgcagctatcggtaccacagccgctagtacaggtctcagttagagtgccactcgaccaggtaacagaagggacatttgcgcccgttgacacagaactcgtggcctggggctgcactgtgatagtgtaagaagtccctgggaagacgggtagtggggtagcgctgcccgatggaaccggggagaagggagcttcgtcgcccgaaagcacaagctccgacgactccggcatgaagctttgaaggggataaaatccagtaggggaggtatcggcaccgatgacaacgggccaaaagggaaccttatcggtgaccagtgatgggacgttgagaatggtagtctttgtgccggtcgaggtgcctgaccttgtccatacagaactgaccatggaagggaactgaatagtcgtcgtcgagcccagtgggaacgggggtaaaatgatcttgcatggtgggatgcattgaacctcgggatccgtgttatcccagatgcccggaggaacatagacctcgccggagctcttactgccggcctcaacacaggcgccttccggacaatacccatggctacacgcaaaattgcaaagaccatggtcctccagcccatcgataggagtggctccggtgcctgtagtgggcggcgctggtaccaagccaccctgggcagtgcaggtgcaaacatgcattgggcagaagccatagttgcacgcaaagctacagaggccggtaagagtacccgatccagtgcctgcaatacatgcaggaggtgcgaagtctgagacggtagggacaaccagagggacttcctctgtcccgtaagcggagctcgggcaataccctaagttgcaattgaatgcgcagaggcctgaataacttgcgtccttaccggcgattaggtatccaaccacgcctgtggagtttggagctttcactggcttacctatttgccggcatatacatgctgttactgggcagtagccataggagcaagagaagtcgcagagaccatcgaaattgtttgcaccagttccattaacataggtctgctccgagattgacaatgatagctgtgccgaaacagcggtgggggatattacacttctaacctaagcgttaaacagcccatctgtacaagcggacgagatggctttgccggttacttgggcaagctgagttccatcgcgggagatagtcacgataacctctcctgttcccgtaaaaggaacactgccatgataaattccaatttttccatccggagcccaggtcctggtgcacaatgtcagtcatatcttttggaatgtttaaaattgaattgagatgatctttaccataagccttcctacacgacaccgccgatgctaactgtcacagttgcaggctcgaccagaagagcagagtagaacacgcggtcttgcacaatctgactaggggcaaattccatctgcagttggttggcagtgttccctgtggtgccactatcgcaggctgtaccaggggagagacgataccaggtaacgagattttcttcagtcactttagccgtccccttcgtatacatatcgattaaaaatggcaatgacactctccaaccatcatagggcatatcggtggcaaaattactaggggcctcaccaatcttaaaggcttccattacgtagtcgtatagcggcccaatatagtgagactcgccatagtcattccctggtaatttttagataaggccaaggttgtactccaaggtttcttgaacttacaagaaataatttccacgaattcaggctgattgtagagaacctcgacccagcgatcgtaccatagatcatcgcccctccaaagccaattcttgttataaccaggtagattggtaaagaaccacagcgaaacagccatcatataaggctttatcccagacccattcagatattggtaataagaggcgtcggtataggtgtccatatcctatgggccccacggccaagctgcccaactaaagagaccatctgccacgccgccacctaactgcaaggctggtttggcaccaatagacgaccaatcaggtataaagaaggcgttgtatttctgcttcagatcaatccaatcctctgcatgcgcagggccctcgaatgtggacacaatatattgccctttgtacaggtaatacgcagtcgatgccgtgtattgctctaggagcgcggccacgtcacctgctttccacggaccgttcccggcgtagtcaaaggaaaagaacaatgagaaatgcttgtcgtgggcagcctggaaagcagttggcagaatttcagcaactctggagtcaacagccatgttcagcgcaaacgcattaatgtgagcgtctagggctgcttggatgtctgtttgccagtcggtcaccgtgtagttttccgcgttcatcagctgtgattcatgtcagcttcttgccattacgtatagtaggaggagataggggctgtgatataccatgaagtgcgcgaaaacggctgcagcttggacttgacagtgccctaggagggccactgccagcaaagaagatagtctcatactgcgatacctctgcagagaggaacaattgttcgactatatcagaaagacagcccactgtcggttggacgggggagcaatgggtttttatacataattcggtcgcattttcctagtcaactccgtgctaacttccgtcttatccgcggatactgcttattacgagaaacaaacatgaaaatctgcctatttaagtaccaatttccggtattcctcattgtttaggatggtaccgaatgaaatacaggtccagtggtagactagattgttagtgcctggtagtgccatggaattatctagatgaaatggaaggccagatgaaaaatattgtactttgccacacatcaattaagctaatcgctaccctagtctcaggtgtatttctctcaaagtaatgataagatgccagggaattttatccttaaaccattagttaaaaggccatcttaataaacaggtagtatggcaaattctcattttcgaatgctgttgagaagtcataagtacaggctatgtgcaatagcacgccacatagaaaatttcgccaaaattcccctcttggatagcctaggtagcgttgcggagattggcatacttagcttcgcctcgggaggccgtgagactctagccggtggcgttggagctccaaccgagccctcgagcctcgaaacccttcaggcttagtctgtcacgtgcctatatatttgaaaacaacaaatgtagcattgagcatcggtatgtatcttgctgattagggcatagacacggagtttcattaataagataatcaagtatcttgtttgggttatcgctttttggtgaccactactgtgttagtgtccctcatttcctcaattctcgctctactctcgactagtgtaagtagaggaatactggaccactaattcagtagttcagggcaaatggttcacttccatatacagtttagtctcggagtcctcttcccgactttctttagtgtcgcccgaagtggagttctataaattactatggattagagctaggctacgctggtcagtatactccgatcgaggtaggatggttttctaattcataaatcatacccatgcatatggagaatgtcgcgagtgcgcattggccgataatgccctttttacatattccttttttttttctcgctgatagcacttaagatctctggggcaaatgtcccaccttggagaacacagcatttctccaaaagaggttttgaccatttcagggcccgcgctctcctgaaaccgcgtgtagattgtaagatttctatcagaacgcgctagccaggcgcacctgcagtacagtgagtctcgaaactgtggtgcatcctgtgaatataggtcgaacagcggtgtttggccctcgtatattcagtatagatagagagctttcctgaaaacccaccattcccgtcgcttcatatacaataggcgttggctgaaatatcctgtgtcaagtatttgtgatgggggccagcttggcaggtgtccggattaaccgtgtgtccggttaaaagttagacttgtacggtgaacttggatccactttcagaattggtcactagcgtgaaccatttaaaaaggccgaatgatacagtccctgactccttcatctgcaacacctgttcaaaaactggcgtccaacgttgccatccatgagagacgactacactgagtgggaacgcttctcccatccggacccggacgaggaagaccctccgactctggacgaagttcaaaccctgcgagaatttgccgagaccttcggcacagccaatgccattgcagcagaggatgctgctcgccaactaatgtcgctcgtcgacgagggccgcgtggtcgaggagcgccagaacaacgtcgtggacaaaggcgaacgtgtctcctggttattatgggatgctgctatcgacatgacgcgctaccagcctgctattctcaagttaattgaggcgatccgcgcgctgcctcagctggaacgaaccgaggagcagatccgcaccggctgtttcgaggaccgactagaaacctggaggtccttggaggcattcgattacatttggtcggagacatactcccgtgagtggccctttttttttcttctcccgcccctaacagaccaacgctgtgcagtccggtttctttgctcccgtggcataacggcttgaaatttcggagatatccgcctgcacatcctcctgcccttcatagagttcctcctaggcagctgatctcatgtcacgaagtgtgggccctatactaatccttttcatccaaggctgttgggagatgagatacggcccatatccctattacgggtggactgaattccacagcgccaacgctttttatgcgcactttcttgccgcttatcctcccgaatctcccgatctcagggagttaaccgtggcattgcgactgatcgtattcgccctcgagcaggatccgtggacccatgcccaacaacctccgccgcagtggcaaggccaccgctatcgggacactggtcgccctactgattatatgcaaatgctgaatgtgagtgggaatgaaaggccatgatggcatttgtgatgattgacttgcatattttaggctgatgtgcacgctatggttccattttttgagattgccgggcacattatcttcgggtttgtggggaaaagagacctttctctcctcgaaaaattaaaaaagagggattccaatctatggcacggagactcattgttctcattggaaagatgggaattttggaaaacgcggttgcgatggataagtgagcaagatgagctgatggaaagaacgcgagcggacgcccgaaagattgtgcaactcatgcaaggaatcgagcaacagaatcgagagatacgcttggggagtcaagattagcataaagataccagaaataaggacttccttcgtcgtctattctgatcagctcatcggcccacttcatctgaataattagttaacgtaattcactagtgagttggccacacccccgagttggccaccccacctaacctgtcaattttaaaggccattgattcgtcccaaccgtttattattacccgatcagcgttagccagaggatccgagctagcatcaaaattagccatagccatgcgtgccgaggtttccgcgctaggcaggggttgaattccaaatccattagcgcaatcaatagtataacccccgtatctcttgttcacagcccttaagactggaaggcgtgatggatgaagtcagtatatcagtggtagatccagaagatcatgtcacatggactgtgcgctatgcatgccatgggacgtaagaagctcacgtcccgtcccgacaagggccggggtgcgccctcgagcaggatccgtggacccatgcccaacaacctccgccgcagtggcaaggccaccgctatcgggacactggtcgccctactgattatatgcaaatgctgaatgtgagtgggaatgaaaggccatgatggcatttgtgatgattgacttgcatattttaggctgatgtgcacgctatggttccattttttgagattgccgggcacattatcttcgggtttgtggggaaaagagacctttctctcctcgaaaaattaaaaaagagggattccaatctatggcacggagactcattgttctcattggaaagatgggaattttggaaaacgcggttgcgatggataagtgagcaagatgagctgatggaaagaacgcgagcggacgcccgaaagattgtgcaactcatgcaaggaatcgagcaacagaatcgagagatacgcttggggagtcaagattagcataaagataccagaaataaggacttccttcgtcgtctattctgatcagctcatcggcccacttcatctgaataattagttaacgtaattcactagtgagttggccacacccccgagttggccaccccacctaacctgtcaattttaaaggccattgattcgtcccaaccgtttattattacccgatcagcgttagccagaggatccgagctagcatcaaaattagccatagccatgcgtgccgaggtttccgcgctaggcaggggttggattccaaatccattagcgcaatcaatagtataacccccgtttctcttgctcacagcccttaaggctggaaggcgtgattgttgaagtcagtatatcagtggtagatccaggagatcatgtcgcatggactgtgcgctatgcatgccatgggacgtaagaagctcacgttccgtgccgacaggggccgggctgcggcccggtttcgatcgctttgttcttggcgcagtgaggaactagtccaaatgtggttaggaaaaagtggtttaaaaaaaggataataaaaagaataatacctaacccaggaagtatcgacgtgccaatatgcatcaacccaatcttgcaagtgtcctttacttccccagtgccattctaatctgacttcttatgtggaggataatccacgaacagcaccctgggaactgaaggctacctggcctgatgaaaacagcggtgttcaatccagtctgaaccacggtcgcatgcagatcacccggcttatacgcaattggaaaagatacgtttagagtgcaaaaagcgttgcgatttgcccggggaaagctcaatgtgctccaccatactgcggatcgggccctggtttggtttccggagggttcccctgaatccgatggccaaaattgcgtcaattgttctatatcgggcagggacatactgagacggagtacattctgaaaatcctatttccttcaatcaactgagcaatttcaaattaccatattcatattattatcgcataacaggcggctatagtctcacctagtagcatccctcaatcgagataacctccacacaagctctccaacgtcccgccattggcttcaaaaggacgatttgcggatcttccaggtcggcgcaaagtgctgatcaatgaccggctctgatcggctcataaatctgcccaagcacaatggcagtagttcagcgagatcgtgacacttggactacgcgatgcctaatgccccgtgagccagacactagactcaacctagcttaagtcgaaaagcctaggccatcggggttacgagggttcccctgaatccggcggccaagattgcgtcaattgttctatgtcgggcagggacatactgagacgacggagtacattctggaaatcccattttcttcaatcaactgagcaatttcaaattaccatattcatatcattatcgcataacaggcggctatagtctcacctagtagcatccctcaatcgagatgactccacacaagctctccaacatcccgccattggcctcaaaaggaggatttgcggatcttccaggccggcacaaagtcctgtccaatgaccggctctgatcggctcataaatctgcccaagcgcaatggcggtagttcagcgagatcgtgacacatggactacgcgccatgcctaatgctccgtgagccagacactagactcaacctagcttaagtcgaaaagccaggcgatcgggattacgtatgcacaacctgataaagtgtcagaataatcacatagtcgccgttttgcgaacttgtcgatacttcaaacgaagcactagtcaaaaataagtactataaacgagtgtattatggatgagggggaatttgattttcagcctaccgtcggactagcgtccaacaatgtcggctaatggcaggcatctctacagcttgaaacacaagacacgaaaccgatcttccgcgctaatacatcctaattcggagggccaccataatctccgccaaagggccgttggccggatgagattaaatagagaattgtataagcttgatctgcgcgacctaagggaagagagtatgaccgtgcaatctccggtctggtatatcgaatactagactatacctatctaggtggcgttatatatactatataggtcacagactacatagatgatgatatttgctgattcatgccctctagctagataaacaaccccgtaatacctccataatagtacacttcctctataaaccaactcaacttctagtatcttcaaaactagggtatatattggctagctgtcaggagcggttggtggttggcttgtgttagcgcttgttgattggtcaacggaagtgaatagctttaaagtgagttagtactaagcgaacccatctggccgttatacaccggctaggaaggttgtagtatatcagaagcagggaagccagtaaatgtaagcttatttttctctgcggttttctctacctctatcttcttctccagctagctctacatatattaaaaattaccgctgacctccagtagtatgggtaacagattattactagctgtattaccaacctatatagcgttgagttattattattttagactagatatttggaacttaagtatttaaatcctagccagattctggtcattagtatcactcagctagcaaatctttgccatagcttaggtttttcctacctctagtcactgtactaattataggagctcatcccgctctctattagcgtccttaaaaccctataagtatcgtcgataaataacactctagtacttttgtttagaggtctttactactagtaaagggctttagattctacactcgggtaagtccttactttaacgagatcagtaattaccggacgtaccaatagtatatagagggatataccttaggtacctggcagagggccactataaccagtagtaggacagtattgagtccgtttcagagcagtatctgactcggaactgccataaccagtatcagctagggcttcggatatcgtcctacaggaaggtatatcgagcgttagcacaccgaaaggggtgtctttataagatagagtaagtttagcattaaccgttcaggtagacaatgttagctcttataggtctccggcgtatacgctagtagctagaacgttttagagttagtcccctgccgcttaatctacaccgtaggattataaggttagcagatcggatacctagtcattagtctataacataataaccggctcgcaataatagttatcctgtaatttctacactatggttacattaagggtcggtagtcagccgttaaccattacttaaccagtaggtttctcaataataaacttactttattatctataattctacagttaggttttaaacattatcacgacagcgtactctttctattagtaggtagcacttattcacatatccaataaacattatcgttagaatcagatcccagtctcatttaaactacctaagctttactagaccatgcaatttcgctaagtacccaaccaccgctatctgtatatattagtaatctacctagtcttttcggttactctagacggtatactttagcccagacttcctgccgctaagtactcgaaaagctctattagacagcgcgtatcgcgctaagtaggaactggtagtggttaatttccggtttactcactcctcccgatatatcaagcagtctatcaataatcgccaatctatagtagggtatacgccataagatatttgcggcaacagtagtggatcatacgccgatctacgttcgtaaaaaggtaggttttaggtaatctgtgaataaagagtctgattcattggacctcataagctactctatatttgaaccagtcgcgactcaatagtgccgccacttaaccagatatcgagaatatattatgggttaatatagatttatccctgttatataatttccgtgttcctattattagaaattatataccggggtacgcgatttggctcagtctcaaccgtatggcatgcgttaagtctgtcacatgcaatactggccctgtcggccttcccttacgggtttagcatttatcgttctttccgttatcgcaaaggccaggttcccttagtctttaagctggctgtgtttactcgccgtcagctaagggtatgctatcagtttggcgtacatagcggtttctctgtgaaaatgtgaaaacgttttacgagtcttgggttaacagtatatactactccaatcttctttaccatttccgtcctagctggtaaataggcatattagggttagagagcacgaaaagtcttactatagtcataggcgggaggtatataaggcaccaggtgatttcatcattacattacacaatatagacctcgggttctccctaccgtttcaaacttggcccagttaaccgtatatagtctaaaagagttcaaacagaccgtttaagacccgtaagatataagcccattcgaagtccaaggaaactctagttagagactaaatattaatatagagctatatatataagcctaacctccgttactcgagtatgcttcctagtgcttccgtcagacctatctcctcgtaactccgattaagatacaacttagtgcctatctttattctaatagaatggattctatagtaggcttactagacccctttcaagctccatctaactctataataggaatatcttcgactcctcgcgaggctcaacagtcgggcagtccaggtagaacgagcctagaccaaacttgaacaagaattaagcgcctctagggctaccgagaatcaagcgatagaggagctgggccatatatccagattagccgatattttctttaaactcagtcaaattctaggcagcgtagtagattattagctaaaggagtgtggaactaaagaacccagctaagagccagagttaataaaggtcatacttgatatcttattaaaacagttagaagtacaggagttagctaatagcggtagaaattccgataatacctcgaaagcggtgatataaaggcagcggtatagtacagctaagttatagctaaaccagagcttaccgtacatcgttccttatttatatacattagttattacttataaaatgactgggtttatttacagcttagtcgtatgtagaaccgttataatattcttttatctactttactatagccgttcaaatggattcgtttctacatctgcctatatatatgccgttatattcttagttcagtttagaatacctctttccttaaagctactacaattatatttcaatttatactaattatagaaactaacagattttctgttatacttagaagctaacgcgagagctttaatatattctagaagacaacccttctaattatactattactgaatcgctacccccgacttaatctactactagactagaaaatgtattcaaataggaccacattcgataatcggtagctctatcgctagaattaatttctaaggaattctagaagtagaagatacaaccagatagctctaagctcgatatataagtctaatatagatatctctcttatattaatactaaatcatatagcagagggctattattaagatagtaaaggggctactccttaataaactaatatatatactagttattagtaggaagttggaatataggacaaaaaggcaagataggtatagcagagtggggggtatcatggtttattttcattcgtagtcagcggtcctactagaagataataaggcattattaggctaaatggttataataaaaagttctattaacgtaccggccgctactattcatactatatagggagtatatttattgagagttattatcgatttcttatagcatataaaaaccggtaatcaaatggtatatactaactgtttgtacctactatataggatatactagtcggccagccgtttaccggtaaagcagactagtggtacccatcttactgagtttaggtagcttcctctgtttaactggcctaggcgtataactagtccatccatctttaggcgtactttttagttcagggaatgacgcctgcattcagcgcatagcatataccttgcggcttttaagagtcctattacaggtgaataaccggtagggagatcttagaacatcttgagacatatcgctccatctatccgtgaatccttagacacaggattttaataacaggctccattatcttcaacccatcggcactttaaataatatatgggatcgccaataatttggccgaggagtgactgaagatagtcagagctccagtacatatttgactgctgatttgcaactgtcggcaagaatgcggtccatcaaggggcaatgtacccgccgaacaatttcctattgtagtagcacatctgctatgtagggctcaaatgcaggagagactctgcctcccacccaagaggatggagcttgaacgtgggattataacccttaaacagtgatctcatcatctcaatttggggttcatcggaagcaggcacagagcatgacttcagaatgtcaatacagtacacggcaagctagcaccttagtttccatactcacatgcgtacgcttggctaagttgctaccatcattacaggagggtgccgggtattattccgcctttgatcggtatccgcgaatggttcgaagaagagagagcaagtattatcgttttatgactctatacatttttattgccgggctcgtgagattgaagagtagttgtacaccgcagatttctacataccggcttagacttttatgcagaggttttcgcaatgacaacatttcccagctggtgcaatcaacttttctcatcgctagaaagtggaccgcctaaggcgcaaaatagtgcgcgctggggtttgtttgctaaatcgttctataggagagtgctctcggatgcattgaggaaatgctgtatatgaccaagatttacatctaaacgctcctcgattagccttcaacgctcgctaaagtcttaatcactcttaaccagctcttcttaaccactcttcttaaccgctcttcttaaccactcttcttaaccactcttcttaaccactcctcttaaccactcatcttaaccacccttcttaaccactctttactacagccaaaataaagagaattgctaactcgcgatatttggttttctagaatacctaagcaaatggtcgccgtttttgtctataatgataatggtatttctaagtttataacccataggacctatccttggcaagagaccaactatacaggtatatctgttttattctttaaggttaccagaaggaccgcgtgacctctaatcgccaaagccataggtatatatagacttgatatatagatagagcgaaaaatagagtaattatcattccctctaaactaaaaggaacttactaactactagtatcgtagatactttattcaagtaggaccatacctatatagtaggagttttcatttagaagtagaaagcaggaccttaagagtaatagatatcattaagacagtaaaccctctatataatagccttacccaccatatagtatctagaaaatctaaacttataccgataaggccggtctagaaccctataaaaccattaagtagtcgtatagttcgataattacctatcccctaaaagctaatataaaaggccaaagcgatttagtgccttaagtaccatatacttatactataggagtaatttagtgattactatatagcagtgtatcctttctagcttaggtagtattagcacaaccctatagcactactaatcccctagactagggataagctctttaactctattcttagtagctattactagagaataacgagcagtaggtaataggccatagtgaaaaatctactactacagtattatattatacccagagaacccaatcgctatatatatacttaaagagtaatatagtattaattaaaatatctttctataaagtagctaggccctaaaagttttatagataaactataatatacctatagttacattccttagtaatagtatataccatttagctattcgaatcttttagtcgcttttttatactatacctattagctaatagctatataaccttataatacctactagctatagcctattagaaagaagttctcccctagttgtctactatatttatatttatattaggatattctaataatattttgataattttaaccctacctagagctaatataaatattagtatagtaaaggaaaagtaatagttttagttattaattagcaaagatttttcggaactaactaggagatagataatatcgatatactctataattattataaccttaagtagtaatattcctaatagacttatttagttaatattggctaaattctataagagaaatttaaccgctataaactatcctatataatatattaactagagtagtagagatatattagtaaattaagggctcttataaagccctagctattagaagaggactttaattaagtctaaggagctattcgcaatagcctttactaaaggtatctagcctagcttatcggcacaattgaaatctagatttatttactataagaggaatttaactaattttatattagaattacttactatatactatattatagtatatctattcttatcttagtaattaaggttaatatatagacttaaaagtaaggctttaataataagcagcctttttttaatagggaggaaacggctatatcctttaataactagaagtaacagagtttcctatcgatagttaaaatagttaacattaactcaaggattttatataagtatttagattactctatagtcgctaatctctattactaggtatagtggtatttagctataatagtcgtagatattaatatttattcacttattagataaaagaagttagaagatataagtttagcgataggttagtgtaattaaaataggtgtaatcctatctagtgattagttattaagattaatattcactatattaaggagccgttcgataatactaacgcttctatatagaatagcgatcgagaaagtactttctcctaaagtattatactatataatatttactaaataatagcttaagagtaaactaatagcttctaagtaccgtaactttatagctaatataagcggtataaggctagaaaacttttagttaatatctgccttttcctaacctagaaagtattagataatacctaagcttctatatttaattgcctaataaattagcgggatatcttaaaagtctatataattaataaggctcttactaaagacgatataggatttccaagatataagatatagacttcgaaggtctttcttatcgatagatttaccaatctatagaagtagttctagtagaagtcctaaaagcggtatctcagcagattatatgaatgtataggtaacgactacctatacagataataataaaaggagggctcagagtaataatttagagatcaagtttgctactacaagtggttggcggaggagcttaggaggcgcatttctttatggtactggcttctatttaactatttttgagggcatattattgcagccagtacactaaataacgatatcaccgacacagagttacctaaaagtattgagttaccagctcctaggattatactacttgctcctgggatcctgcgactggtttctaggagccctaagaatcccgggagacagctatagtgttcccaggaaacactcaccgattcctaggagttatgcatcgtacctgagactctaatataacggacatacgaaaaccgagtcacctaactcctacgatctctgtttcttgtctcagggccaagtggcgccatcgtgaccaacatacaaaggtcaagcgcctcgccagccatattacaacctcctccaacccacaagtgtaccatcttccagttacatccaatattagcatttctcgagcattcaactttgctctaatcttttaacggctcccacttccacggattctatcctatcattttcgttcaagaaacaaacaatgggccaatactggctagtggtttgcccgtccaatcgcgagtacacaacacagtcatttggagggaagttatcagagttgctcttttcgtcgtggtccaacatactacgtgacctgattgaaaacgagtgggctggcactcagctcatctgtattggggattacttaaatccagacgacctccctgccacgattcaacaagacaagttccacctgagttccgctgagagcggtgcaacatccgagcccctccgctacgatgtcgttaagaaaacgtttggattttggtcttacgaagaagagaaagcagcgactctcacggtcatggaaaaaccttccaatcccaaaagtcgagtcctgaggaacttaactaccggtaaatatttctttgaggacgcgttgccatttagaatcaccattggccacatagttctgatgagtatctgttggtcgtcggaaagttcaataggcattacgggcggagcatatctggccaagggagtctgggctggccacaagttcgacattgtagatgccgacatggtggaacatatgaacagacaatgggaagatgtcaccgaggacgtcctcgatgaggttcaggctctgtggccgagcgatttcggacataactcggaaactgaatggagagtttaacacgtcctgggcaagaagctatgaaatcacttgacgtaaaagatatccggggatataatcctaggctaccaaacaaattgccaataagaatatctttggacacccttcccgtgatactgtacgaacaggtgtggcctgtgcgaccttcaaatccctgagtttctctaagcacaacgcttcaatcgattgcctactcgaatttactcgtcataactagccgagggaatgtatggaaaattattattcgaacgataagagtagaagttcattcagtagtaaggctttaaatttagacaagaagtttcaattcgcctggatagagtgctcgactgagtgcacctttaacttgcttcatagggtcatgtttcacagagagtaacccaaccagcaataatccctgcgctgaattcgtctgttccgaattctggagtattaaccccaccttcaggtaggacaagaaggccgtctccgggcacccagtgaggttcctgggtactaataagttcctggggccgcacagtagcctcctggcagtgcatgttatcatcctaggacgagcaagtttctacgtaaccacgttaaattagtggtcgacccacccttttttcaaggattttgtccgcagaccaactatagaatttgcaattccgttttaaacaagtgactgaagttgaaggttgctttcgatatgagtgctatgaggtttgatctaggcaacgttttctttataaggctattttatactcatatatataacatcattgagaagttacaaggatgattgaaatagcagatctcagaagaaatacatatcaaaacatacatggtacgttacattacctcttcataattacttactaagttctcttcttcatctatggcggtgcggaccatataactgtaatgtaactatttgtttcattgtaacaagctggctgtactaagttttcgcaagaacagccaagagttgctcgtgttattagccccaaacggtcttctttgcccagtaaagctatgttccggatagatctaatgaaatgccactggaaataaatcgattataatataaaggtatatccgcgagcccacctaaaaagacacttatcatgcttcagatttactacgcttaaagtatagggttttgccccttgagtttaatataccaaatttactccttatagacaagtatagtttagcaggtatctaagcgatccatttattaaataatcccttattctcgcacagccaaagagttccaatagtgcgataaggagtctagggtttaaaggtcggcagagggtcggactaccagctgatagtaaatttatacagataaagtaaaattccagtatatataaatattattaactaaagaaataatttagttaccgttccaattagcccaagatctagtatatctctaagaaggcttcaattccatccatacctatcgcagtaacgccatattaatatccgcgaaataaggcctaatctatcttagggtcaaattcttcctctgtaggtcatataacttctatttattctttgcgttaagcctcttaggggggttatagctatctagactacctaaataatactaaagcgactgggtttgtgccttagctctagtaaggggtctataagggctactaggagggacttagttattataaggcagattttacttactatcttcctataaaggtagattactatcacagctaaattctatggtaatagcttagtcataagtaggtaaagaggtaagatattcttacaaatttttcctctccttattagctttagtaatagtatagtatctagaaggctaactagtaaagcttagagtaggaggttgcggctattttatactactaatagaagttaccttatattctttatatagggaaataagtgattctagctaaatagtagcttaatcataagattggtgtatattatcactattaaatttaggcagctcgaggatttaaggattaatagccttaaggctaagagttattagccctaagctaagtaaggaaactaactctaagaagtatggttctactaagttactcctattactaatactatatttattataaatactttatcctaagtattattctagattccctttaatagataggagtaaggctaggataggaaaagaagacccttctagtatatagtccttatacttataacttagatataagtaatagtaaaatcgagatttcttagaatatcccttttatagacctattaaagatatttaggcttctaacttataagtacactttctcttactaggtagctttagattttactatatagtttccttaagcctatatatattatataagtaaagttagaggttatacttattatagaagctttaggaatatctatatattagctttatctaataatacctaattttagctaagtactgtcttttaatatattcccttagattattactttatagctagtattataaatacttttctatagagagatcggggtcctataaatagaaggggtagtagctaagacagataatagtataacgatagataattactttatagtattaggctttctaggactagagataggtattataataatcccgctattaacttaataaatactagtctatatatttatagtaaaactgtatctctaactctaatatttaaaggctaaatactttcttataccgaatatatctataaatataagcacttctattatattttcttaggctagtagagttagtatccactaggttattattaggttagggagcttaccttataatattaatttaataaccttttataggatagaggccttatactaggcttttatttaggagatatactatattaaaatcacagagatactatatctatagatcttcgataaagagaagttttttattaaaggaaagctctttagtagaggatatagctgttataattcgtataaccttaggtataattagtatttaagtatatatataaatattattttccgaatatattagctcttcttttctttaattaataactttccggtctcttttctcctatacctactgaatttaatattacttaagtttaaaaaggcgatattaaataagtgcctttctatattctaacttcttattcttaaggtaattcttattatagttctatataaataaatcgatctaggctcttatttctactatatctagtttttctaaaatactctctttaatctctactagtaacttacctagtaagctatatttataatattaaatataaccttagaagtactcgatatagttagactagtcttccttatctagaatagctcctactatatctatagaagaatagtaggcttaataatactttagaaaagtatttagcccctaatatactagtatctaactaataggtatagagccgtttctctctataataaaacttagtattaagatctctcccttatatctattatatttatatagtatagggggcttactttcgacttttttcctaaggttttattatatataatagattattactaatttactaaagtaccctatagtagtaaaaatttgatataggtaagaacaaaatttttattttattagaggtatctcctaaggcccgtccactataatatatctaagaactagtttatccaagtattcttccttctattataaccgaatcttactatttaaaagattaaactatactagattatctatagtatctaccctataaatagtattatatactaatataagggagagaagaatatagcctaatataaattgcggcctatttctatcctaaatactaattctaaatctagaagtactaattagtaaagtcctatatatttaataaatatactactatatccttctaacttatactatatattttttatattaataatttttaagctatttctaatctaccttctaacctactgcctaataacctatagataaaggaaatagaactaacttaatatactagaataaagattaatattatataatatcgctagagtaaagataccttactttatatcgaagacctcttttatatttatccttactagagggtataaaagctctaactcttactctagtaaagagatacagctagagagtaaataagataataactttaagtagtcctagaataaatgtttagtagttagtctactataaagataagactattcttaaaaaatcttactttataaagttaagtttctctttcttttaacctataacgatactatctatagttaaatttttttaatctactatatctaggtaagtttaagataatcttagagaggaagttataaataaaccaactatttttatttcctttcgattatctaggataattttagttcttataaattatttaaatctactaaagaatttctcggtatatatacttacagttcttactgtaggtagactattatcatttagtcgcccttaaatagaatttacgtactagtaaatatatactttaattatcttatatattagagtaggagaactaagggaagttttataatatttatacctattctctagatctatagtaaacctaaaggaaggttagaatatataaataggaaaggattactacttagatactatataacttactcgagctaaaggtttatagtttctcagtataattcgttagttttagggagccttttatctttctcctaaattaagtcctcctctttataggttctaggggtataaccattcttttcctactatagatagtacctctctttcacaagtttatcgcacttagtaaaaaaatcctttcggcctataattaatataaaagacgcttagatagaagatttgttaattattatatactaataccactatatggtttacttttatatctaagatcttaagctcgagccgctctaaagaagaaagatataagtaatattataaaatagataggttctctactccgtcctataccctttagtcatgatatatctccttgataagatatagtactccaaaaattgagggtagtaataatgctattaacgaactaactattatagtatagataaccctataggggctaatcccttctaggtatagtctgcggtaggctgagtgcatcagtattactcactgattagatactgagtatcactgagtaatcagggagcacctaatgagcacttactgagcacttactgagcatcagtcattctgtacgtgactgatctgagcatgatcactgatctgagcctgtactgacgtctactcagtgagcctgagcctaagcaccctcataaaagcggcggcagatcaaataggaaatccccatacgccagggaaaatccggtacgtataggtgcatacgtgaagttgacaattgaagtgctggtaccattgggggtggtaacgctcactcgtacggtgccggctgtgttagctggcactacgacggagacagttgttgcggtggacgaagtgggaacggcggtcacagtcccaaatgtgacggtggtggctccagcaagattggttcctgaaattatcgctgttataccaccggtagtcggccccgaagtggggtttatcctggagattgtaggcaaggacatttcgtgtcgctagtatcggtgctgggtttcaaagattgattgttataaatcactgtttgttcgacttgatcagttttcaaacctggagaaggagttgccgtgctttaagtatggctgttctcagcccaagtcgcattattgaggccattgtcacaagatatggcgtcgttcgatagtcacaaggtagcgtcaattgtttgtggtcatatgcattcttgacgatcctcaaggttgcttgaggtgtgtgcaaggtggttcaagtgttgatcaggtggaggtattcagagagatgtgggttccgcagcatcgactattccatctaggcccattcgacttgtcttggtatgttggtcgaatggtgcacagaatagaaagtgttatgtaattgtttgccactttgaggtcaagaattgtttgatatcactattggtacggagatttgcgtagcggacatcaatgaggcgtatgcgtagtggtataggtgcctgccatgcaaaaaaaaaaccccttttttaggtagtattgatgcttgaatgcctgaattaggtactattacagaggccttgatgggctaggtctgttagttgatcctctcaaatatgaaaatgaaacttttaatactatataaattcttgtatcacctggcaagttttaatatagactaggggccgggcctagttaatccgtaccgaaaatagagtaaacaacccaaaaagtggtgatacataaatctgtatggcgtcaaaagcttcattttgacatatgcggtgtaagacgcgggcttggttctagcgataatcaggcattcaggcatcaatactacctaaaacaggcacctatagctctctctctctcgggcacggacaccaccacagccacacgatatcttgtgatctttccccatgtttaaccccaggatggtcaatattccccgttcattttgtcttattgtccgcttttctggattgtgtatacgcactaatgtgttgtgactctgaagtcttttcaactgcttggtctcagagagattggtgaaactgctatcccaaaaataccccgatatacctcctggtctagtcgacctgttttccaagcgaatgaccgcgccaaaaggtcatttttacctttcgggatcatttctcctcccgattgaagagcaaatacagttcttgtcctagttgtttgaaggtaccttgtatcaatgcctccacacgccctccagtataaataacggatcagtatcaaaggatatctcaagagacgaagaaacccacgtaatcacaagcgcaggcacgaatgtagtcgatgcgaaacatcttgttcctcaagaaaatgatgaaaggattaccatagtccagaagaagaagcttagagaggagaaatatcttggttgggcggaagtgaacaaacgattcagtcagctggacactgcaaggttacatagtgttagtacgatgtttcacggtgtctatataagcttagatttcgatacttttggcgaaattatagttcagtcttcgatctttcttttgacccgtagcattctagatcttccacatgttcaagttatatatcttgtaatagtaatttattttctttattatatgacccataaaatcaatcgccctaaagtgattcgctgaacttatttagccgaaattagcctcagaaaatctccttgatagccaaaaaaatacgagatttagacctacttgaaggtagcttctcaagtctactttcgcttctattgcgatttatgccgagatctgcttaagttagtgaaaccagcgcctatgaatctaatctttagagtgctgtgtcacttcaaggttacatagtgttagtccgacatttcacgatgatgtggttttgaatagtaatagtgtaacgtggtggtactataaatccataaaaggacatcaaccgtcaagcaaaatcttggtcccagatctagttgtcttgtcgttggctaccttcgtgtattccaatgcgtctggttattcttaccatcctgtgtgctgtagcaaaagctgccttttctacagcacctaaagacaatctcaatgcactgcctaccggattctctgatagtgcaccatccggctcttcgcctggtcaatttgatggaatagatatccaaatcgacacaccaaaattcaatttatcaagcgatgacctcctggttcagcttgccagagactcgaatgaagttagcggagattctgaccctaacttcgaggcaacccagttctatatgtgctgtcagcaaaccaatacctcggccgtcatcgataactactatccaccgtatgcgtgtatattcggacctagcacgggtgtatgtcctcaagtcaattcttcatttccatttccatggctgtgcactctccctgagtggtgggttggtagctttgtgagtatataccatacactatatcagcacatcatgataacgcgtctccctgacaattctacgcagaactgttcataccagccttagctgaccttgatactacacccatattgactatcatgtgcatggtcgaaccgagacataagtggaacattctgtcatccgtgatgtcttggttatttacaatgcacagtctgccatcgaagctgctaaatatatgtcgaccagcaagccccacttctatacagtcatttcgttccctggctttatgtatttagtcagtaaccaccttactatcaatataacatgtagtaggttagttagttacttgagcaagcactcatttggtaaacagtctaaatcactactggcaaagtcctctaacctaattaggataggtaaaatgggacctccgaaatattattgggccagactaatggtcctagatagaccgcctttctataccgcctttctgttaaatatactgccaacctcgacaggctaggttatcttgaaattcttttacaaaaaaatacggaccgatttctacacaataaggggtcaacattgcctctgatcattcctcataaatccagtcactatcatcgtcactagaataccccccagtattcgcatcatcatgactatcatcactactgctcacaatctcgttttcctttctcggtttccttttcgtcaagactcgaaacctttttctgacagcttctagatgctgctggagctttggatcttcacagaaaatcccgatgacaacccctactctgtatatttcttggatctccgcaatcatcatatccatctttcctttcatgcaatttctcggccgtccttttggttttcggcgtttcaagtgaccgaaaggcgtgtatacttgactgtttgcggtagcggatttagatggctggataaatgtaagccgatgaacagatattgcctaggaacggcacaacaccacaaagactacgtcaaggaagcaaacgaaacgaggtatcagtacctttcggggcccagagaatgtcctgggttgtgcatattgcacgccgcgaggctgagccgccttcgaagcactctggctttgaggttgaggttgaggagcccgaccaagttctttcggcaagtttggctcgtataattgccctgtctgaacaagaggcgaacaattattcatggagaactggccactgcctggatcgctcatgaacggccgagaggtatggagactagggctcgctgcgtcactcgaaagtcctgcacccgttccagtagtgtcgttcttcgcaggagagatacacaacccttgtttaggcattgttagaggacccccagggatatcgaaccaaattggttgtttgtctggaggctgtggaatggaatctattgtgggactcccagaagaccgaacagcatcgctatcccatagcattgagaacccagatgtgtccatagtgcttgttagatctgttctaggaaccggacctaaacccgaggaagcatttggagacatgggcatgaactcgaatggagtcatgaaaattccatctggcgcgatagtctgctgcggacctggcaatgcagttccttggatatccttctgaggcctattccgaatacgatcccctgtttaggttaggatctattgccatggaatacatatgatgaaactcaaccgcggaacaacatactgaatcgacgctgagattccctattttgtcgtctcctcttttcgagcttgtctccatccgtccctgtatcgtgcattctggtgctgctcaactcaaaacttaaggcccgtttctctcaaggattttgtgggtgtctgagagcattcccgatgagcggggatatgtccatattaaattcctcccaggagacaaggtatctaatggaattagcttcttagtctgtaatgatctgcctatccacctcgcaagtcacctaattggtgcctctaaagcggggttcaataatccggctcgattcttctgtgccattattgcgtactgtctggatatttcttacaacagtctatatcgggattcggtgggaatcacttacctccagccatatttgacatttttttgcattaacagcctggtcgaccataaattatgtcttccaacaactgagctgtaaatagttgagcaaaaacgagtgtagctgacgtatgacttatttctgccctggtagtagtggctagccctgccgccggagatgacggagactgtcactctagtcacgccatgaacttgagtgaatgttttgttttgttttgaatagattaatcacattctacgagtcatgagctgaattagaactcccaactatgaccagggaccagggaccagggttgcacagttgtatggatatggtttagctcgactattgagtggtaagtgacttttagtcaaaaaaaaagaacattggaactaaagcgcgaccccggtcttacgggcgtttggtttgaattctgctatgagctaatactataggaaagttgttctaagattgaattcatgttcaggcttacagctcgtaggatcagccacagattgaatatagtagacaagataaatgtaacagaatgaacaaatagcgtccgaggtataccggcctaccaaaatcaaatattcagccgtaaaagcacgcgacgggattcatccggactccggtcctaatctaacctactcaaaagctattcaaattggacgtacttaggtcgagtggagcttggtccggcggccccgcgcacgggccccataatcgtgtggaaaaatatggtttggtgcctacacctcgtcttcgccttaggtgaacggttacggcattcccaaaaatggtctgatgcaatgtgaatgaagatgaagatagctaatagtgattttgattgaaatgcggaggaacaactgactccgtactcttcctcgaaacacgcactcggatagataggtctaggctttgttccttgattagcgcacacaggttgtctgcgaattataaactggctgataatcttaactaactaggtactagaaggtaaaccgactgttggaacggggcactacatgcaactaactaaccggccccttgaaattcttttaccaaaaatacggaccctcgcatgcggggtctgccacccatcatgacccatgtagtggggagcaaccagaaggaggttacctacgcgcccagcatagaatatcaactctcaaggcgtccctgaaacttagactcaaattttgataatgcattaggatatcgtagaatattagtgccgtacttacaatgaaagatcttaatgtgagaaaaatgagcatttagaccctaccagaactcgaccaatgtatgcacgcctcaagccacagcttggcagtaataacaataccaggcattatcaaatatactgctagtatataccggcttccaaattaggaggttgagagcacctaattttcaacttccgggggatcccaacctgattgcggagcgaagcgacgtacgtacgtacatgtcacgtggccaagttttctcagggggccagaaataatagcgttctaatgggccatcatgtgatcgtcagtcgcttcgctctgcaacgactatctcgcaggccgtcgagatcactcgtaacatcatattaaaatcaatgtatggatttgtgaaaatactgttttttatttggtggcatgcatgcattagtgaagttctccgccgggctgtcgtggtagggtatgtatcttttgtatggtctgtctatgttgtacggagtagtaaagatacacctcgcttgtgagagtccgtatttttggtaaagaaggttcaaggggcccggcgagagagaggaatggtgaattacttactccgtactccgtactccagttatgtattaggaataagtccgcttcctgagtttctagtactgccgtcccgattgggtgcgacgagcagtactccgtacagagttttctgtcatattctgcccacttccggcttacatagtagaaagaaatgcatttttaatggcgatgactacgaagtgtcttaatgagagaaacaacttgcgtagtattcgactgatgatggcggacaaggagaggaggaaaaggtacctaatctagatatgggatctggacccacttggtgtccgccttgctggacacccaacaattttgatcagaaaaaatcggatactttacttgattcctataggacttaaccccttgataatgaagcagttaacgatgaagtctttgacgataaagcagttgatgtgataaaagcgatctagttttgactaccccacccatacatatcaacgggaccctaccgccatatctcaaccaatcccccggtgacaacataaacattccaatttgttggacatggtggtcacctgaccatcagcccggtgcggcagaccccaacccccataactagatagtcgggcattctgccctttaggaattgacaactctctccctctttcatcgcatcactacaatagttatatcaattgttattgtgcgcttctaatattattggaactacccccgagagaagcgagattatccccttttgtacataaaagcctataacccatatagcttgtagactttgagagcaactttgaatcgtgacttttcttcagatgaatcattgaccttcttcagatataacaaagtcagataggatagaacaaagtaagcaatcaatgatatcattaaaataaggaacacatatattccaacaggaggttaattcagagcgagtctttgatagattcaagagttccgcggtcgctgaactcttcgtggtgggcttattatatctaaaacccgttgaggcgatgagcctataactacttctgggcagaactccgtaaagagttgcgtaatcctagggataagatctctatctgtatcctttgtaacttccaggaaccaactaaataagtcggggtttgaaagttgcgaggtctctgcctcgaaaagcgcttggattttgtccccgatatcctgccggatctcagcgatcgagatcatagcgttcatcaccacgccgggaatactacatccctcggatcgacagccctgctgctgtagttcctttggaaggtcacggcataccgagaatgggagtaggcattctgtacagtagggatactgttggcctgccgagatctttgcgctgataaaattgaccagattcaaaacctgctggttgactacctcggcatttgaagaaggacagtcggtgattttatgggaggcttcggcttgcgttttacctccaagacagcatagttcgcaccggtatctttgaagcatagaaagtacgacagtcagggcctcacgtatccgggttagcggttcatcgggttgatcggtaaggggccgtcactgggctcccgagcaatgagaggatggctcaaaatatcgcgagccgccgaattgggtagagtaggtgaggccatgacaggcaatgcgaggagtaaagctccaagccagggaacggctattatcgagatcttcatattgaaattcctttggcaatattgaattcctaagatattctggaacgaagtaggataaataaggctgcaataactctctttggcttttagttgagagtcgaatttgcaaagagttgcaaattatataaagaatgcttcatggcgttacctgggctttggaataaaaatccaatattactgatgactgtggggtgagcgtaatcaatggaaatatcgaattgcgtgctaggggtgacctccaatcttgaaaatggagacttctataagcctgcagatgtattggccaattgggccagccttcatggttgattgattacctgcaagcttatctgcagtctgagctgagctgacctaggccttaatacagtaatcttgaagcggaaagggtatggaggttcaaagggagaggcaccaagattaatcgagggagaaacccaatgattctgtatcagcgcggaatattacccatatattatattttgaaagaaaacaaaaatgggtcgaaagcaggttttgtcgattcccgctgtacggaacctcgctggtctagcggcattcctcattattctattgaatttgttcggcaactacctgttcgggagcctgaaatatactgctcaacgtagccttttgaaagccaaccttgaaccactgaatgaaactctcggggtatgtcactcctaaccacgcttggggatcctcaaaattaccaaaactgcttacacaatattacagttcgaaaggattgcggttgtatcatcgggaacatcttggagactacatggcctcgtcgaggcaaccgaattcaccaatctttacattgacgtgccatcccagcctgtttggacggatactgaagttgacgagtttcgtggttatcgggtccatggccggcatggggagcttggcccaggacaggcacggtgttggttaggccatctgaatatatggcggcaaatgctgttgcaaaagtggtccaccgctttgattatggaggatgacgcagactgggatattgctatcaagcagcagttgcttcgagtcgcacccctcatccaagaagtgacgggagccacggactggtcgtcaccttacggaaactcgtgggacctcctttggcttggccactgcggcgactatatccccttgcaactagcatcatttgtagatgagacgcttccaggatcaccaatgtaccgtgagaatgatgggagattcaccgagtttcctcatcagcagaggatggttcacatgtctgtcggcccgatatgcacatacgcatatgcgctcactgcttcggctgcgtcgaaactctatcaactttccagctccggtatggataaactgatcactacgcatttgcgagaatggtgccaggaaggattcttgaaatgtgtcacggtaaacccggagctctttcaccatcacaaacaggccggtgagatttcaagtgagattggagttgtcgaaggctgggagaatcgatcggcagttgactttacgcctaatatacgatacagtgcgcgatgcagtagcaagaaaaagaggcccgcggcctgccaactcgaatttgatccagtttgatcaagggtgattggcaagcagaatggtacaggttacggttccaaatatagccatgtataaagatgtatttgggtgttcactatctcctatgtagtttgtaggtctctctttcggtctccttaggtctcggtgaggtctcgttaactagttaacgtaatcggtaagcgagtggatcaggcaatgcaacctattgaattcaaatacatttatctcgaccacaacgccattaaattaaataaactataatcattatctatctggacatatctctcttctatgtcctggctgcctatatattccatacgctcgcccggccaggggaggtggtttataacggataaaggtccgtataagaggaaaacatatgtaagcctatataggctcaggaaggaacatctttattattatatatctattctgatatcgatccgtaaggggttcgttatatgaatataggcagatagatttccttatagttctggaccccctaggggccccttcgagactagtaagaatgtaaaggtatacgttatgcaggtgtacggcctgtcaaccgggtaagatacaaagggctttgtagagggaatacaatgtattgatggtatgccaagactaattcttaccagtctcggaggggcccctagggggtcctaaactataaggaaatctatctacctatatttaagaagataaggtagtatataataatttaaagagaaggtaactaataaggtatatactttatattttatacttcttttataagggtagctgttaggactagctaccagtgtatcctgaaaatagaggttcgaattagagtggaggtccctagtgtaggtcatacaattcagtagactaatcgctaaggttctaaatctcatatatacggtatatatatacccctggcgcttacttagtaagtatatcggcctatataggccagttatataagtgaccctcggggtcgtaatattacccccctcctttataagctatatcctcaaagctcttagtatttcctttaagaggtacttctttaaatatatattctttatcttagtatagcgacctctttactagaaaatacattataatagtaactcctaacttcctcttctaccctctactatatctaactataacccttaggtctttactaggaatcctactatagcctagtatatataatatataaatcggattaatactaattatatatatatctatatatcttatataggatcttagctaattaactatttctatagtatatagctagcgcttatataatctatctcctataggcttataccccctaatatacctacccttaggctattactattactagctagatagttatcccttcctttagctcctctactatcttctctataagtccctataccttacctaatatactcctagcagtctattataccctaggtataggctcttatatagaatactattatagcctagatagtaatcctaggatttataggaagtatagtaatataagaaaggaattattaacctttaatcctttaggtaataatatatcctttactataatacttaggccttatttctatatatccttagttaatagcctacttatagtagtagctataatacctctatatactatattatctttaggctatttatactagactcttagtcctatctcttatacctactattatataccttctatattatattcctactaatatataccacttcttatagtatctttatagtcttagcttatcttctttttctttataggttacccccttttagcttttataggtagtcttatatactcttcttttttaaattaatctaatatagtagtttcttctatatatacctaaagttcctatatattcttagtatctctataacctttttatttaactagatactctatccctttatagtagcttttaaggatatattctataatatattctaattctctattaactataatagggtctagcctctcttagcctatctataggttaccttcgaaaggttctaataaagatatatattatataggatatatcctataatacctagatagtaagattaattaataggcttacttccctactattcctataacctagaaaggtcctatatagtagtagtctagtttcttataaggtctccttaagttaatatatatattctttactaggacctagttccctattataaaggttttattaatatacttcttattatataatttctttataacctcttttaacttttctaggtatacccttagatctatttatatttcctctatatctttaatatattatattatatccttataaagatctattaagtcctcttatactaaggtataaaggtctaggttaaagcctaatagagcctttataggtactatacctagaatactataagtagagttattatagataaactatattagtagtagttagtatacctagttatcttagtactaattaatatatccttttaggtagtactctatattctaattttatctttttatttatctatttatctataggtagtaggtagttaataactagtaccttataataaggaagaaatagaataataactagaatttacttataaatactataccttagttatttataaggtttcctagtattctaaagagaggtataatatatttatagaataaggttataagtctatctacttctatatcctttatataaggaatatatagtgagtacttcgtgaatatatcgactataaccataagtatatcgtagaccttatcctaccactttatagggggtaaccctataataaagtcgatacttatctattcggtaggtctctatagtactagtaatagttctagtagactatatggcttatagtagtatactgcgtttagctagtaggtcggatagttatttatatactccctaatagatttatatatatcctactactagtattttattataatagcctcctttatatactaagcttaatagtagcctacttaggggttattatagtaaatatatataatcttagcgattagtataggttcctataggatatagaccttactattatatttaagtagactattatctagccttatactctaggctgtactttctaggtagctaccctagtcctattagtctatctttataagtttcttctatactaaggtatctcttatctataccttatatataaagtcccttatagactcctagggtttaggatagagtaatatcttacctataagggcttccttagcctccttttatattataagtatatatagggagctattagtatcttctatacctaatcctatagctaggtaggtaacttcttatagttcctctactctttagtagatagcttctttaagcttatatataaaccttacctagtgctatttattatatatagaggtttatatatagtctagcctcctacttagtatatcggctaggtttgtagagctagttctaaatataatagtgaagttaaaacttactatatacttagcctatcttacttatctgtaaggtagctccttcgttattataaagttcgttaagtttatataatctatcttaactaagacctagtatatatttcctttaaggaaatgtctctatttttagaaagcttctataatcgctagtatctcttagtctcctactctatagtaggtttcttctaaccttatcttatataagaagaatataattagtttctaaatactactctctttttataactataagtagattactttaattactttacctaatatattagattttactaaggttcttagtagggaattaaagtatataaagagaggggctttttagaaaatctccttaatctcttagaaagcctttcttatagctttattaaagtagaagcctagcttctttttattcttccctttcttctatatatctaggccctagactaatatattgagcggccctataatctttaagtataatttaataaacctatagtaaaagtttgcgaaacctataaattactatatatcgaagatatactctagttccggctaagtagtaatcgcttctacttagataaggtctatagagatactattgctaaagataataaatctaaggaactctacctaagaagtatagaaggtatacttcgaggcctttatatagagtttaaactagtagagccgttctaatactatttatatatattctatataagattccttatcctaggaaaagattaagatattatttaagtagattactaggaagatatctaataatcttataagagccttatttatataagcttagaaggttataggtatatttataagcctaaacggtattatataatactcgaaatatctatagtaggttctaaataccgttttttatttattacccttcttaatatagatcctatagtatatatctctaaggtctagcttagtatagacctttatactagtaagtcttaatagggatttactaattaagggtagggagtagtagttcttaatagtaattatatttaatctatagaagtctatatatagccgaagtttactatctttctttaatataaaaagaataggtacccctatagggctctttgaatattagatctagcccctcttaaggttcttgttaatataggtatatatagacatcggcaaagcccagcatgggcccaagatttcggcccacggcccaacccatatgggctatgggcctagctcccctaggcctagcccagcccatagcccagtaggctaagcccataagcccactagtagcccatttaggcctatttttatataaataataggtcttagtgtatataaaaatgcttacttagtagaatagtatactattacttacatgtgttttagtttcttaattgaaagacagccttttatgtcctagtagccttgaaattttagtttttatttatgaaataatttttaatatggccggtcacttattatttctagaaagaataaaaaaataaggccggtttagtgatactttatagataggctggtctctatatagaaatatatattatagtatagctagtaatgtaggtatactaggtatattatagtgaattataatacctatgcgaccgaatcctttgacctaaatactgattaaagactattaggagaattaagagatatctaatcctataatataatttaaaaatagtacctaaaagaagaggggggccttataaggctaagaaggtatcttaatcctattaagtatataccttttaaaattaaacttcttttatttttttctatttttaatagtatatattttagatttaaagtatattctttactctataaagctacctactaattttaaagggctaatatatatttctttatatatcctattctatagttagctatagtatatagtctaatctatatactaaatatagttattttaggataaaagggtatataggtactactatagagaatataaattatatttaaaattctttagactatagcctacttataattaattctagaaaatataaactaatatagagactagtatataggttaatatagagactagtatatagactaatatagagactaatatatagattctattattaatagaggaggtattctatatactatagtagagggagggggctaaggcctataggctaatagttaaggttcttaagagcctagttaagaggaaagagttaactaagtattagatttatatatttctagattatattattaagtaggagctatagaaaggataggaagactatactaatttttaataatagtagattagtataattaaggtttagtagtatatttaaaagaattaggagtatattaataaagtatactaaaaggcgactatactataaggtatataagatactaaggccttctttagatatattatattaaagttaatagttaagctaactagtaaattaattatagtaaaaataaactactaggatataaggcttactattaataataaggttacctaatatatttcttcctctaggagtagggtctagaagaattataagtatattaagctaattaatatatagtaggcctactttaggctatatagtaagtcgannnnnnnnnnnnnnnnnnnnnnnnnnnnnnnnnnnnnnnnnnnnnnnnnnnnnnnnnnnnnnnnnnnnnnnnnnnnnnnnnnnnnnnnnnnnnnnnnnnnnnnnnnnnnnnnnnnnnnnnnnnnnnnnnnnnnnnnnnnnnnnnnnnnnnnnnnnnnnnnnnnnnnnnnnnnnnnnnnnnnnnnnnnnnnnnnnnnnnnnnnnnnnnnnnnnnnnnnnnnnnnnnnnnnnnnnnnnnnnnnnnnnnnnnnnnnnnnnnnnnnnnnnnnnnnnnnnnnnnnnnnnnnnnnnnnnnnnnnnnnnnnnnnnnnnnnnnnnnnnnnnnnnnnnnnnnnnnnnnnnnnnnnnnnnnnnnnnnnnnnnnnnnnnnnnnnnnnnnnnnnnnnnnnnnnnnnnnnnnnnnnnnnnnnnnnnnnnnnnnnnnnnnnnnnnnnnnnnnnnnnnnnnnnnnnnnnnnnnnnnnnnnnnnnnnnnnnnnnnnnnnnnnnnnnnnnnnnnnnnnnnnnnnnnnnnnnnnnnnnnnnnnnnnnnnnnnnnnnnnnnnnnnnnnnnnnnnnnnnnnnnnnnnnnnnnnnnnnnnnnnnnnnnnnnnnnnnnnnnnnnnnnnnnnnnnnnnnnnnnnnnnnnnnnnnnnnnnnnnnnnnnnnnnnnnnnnnnnnnnnnnnnnnnnnnnnnnnnnnnnnnnnnnnnnnnnnnnnnnnnnnnnnnnnnnnnnnnnnnnnnnnnnnnnnnnnnnnnnnnnnnnnnnnnnnnnnnnnnnnnnnnnnnnnnnnnnnnnnnnnnnnnnnnnnnnnnnnnnnnnnnnnnnnnnnnnnnnnnnnnnnnnnnnnnnnnnnnnnnnnnnnnnnnnnnnnnnnnnnnnnnnnnnnnnnnnnnnnnnnnnnnnnnnnnnnnnnnnnnnnnnnnnnnnnnnnnnnnnnnnnnnnnnnnnnnnnnnnnnnnnnnnnnnnnnnnnnnnnnnnnnnnnnnnnnnnnnnnnnnnnnnnnnnnnnnnnnnnnnnnnnnnnnnnnnnnnnnnnnnnnnnnnnnnnnnnnnnnnnnnnnnnnnnnnnnnnnnnnnnnnnnnnnnnnnnnnnnnnnnnnnnnnnnnnnnnnnnnnnnnnnnnnnnnnnnnnnnnnnnnnnnnnnnnnnnnnnnnnnnnnnnnnnnnnnnnnnnnnnnnnnnnnnnnnnnnnnnnnnnnnnnnnnnnntatattatatatatagcctttctaagataattccttttaataatagagaaaataataggataaaaggaagtttttaattataagtaaattctttattaattatattatattctatactaatatttaaatctatatatattttattactatttttaaaggtaattaatatatataagtatataatagtcttaataaatagatattaagctaaggtattaggatttactttaattcttttattttctctaatatttaggatttactttcttttattatttaaactaatatttaaataataactttctaaggatatttatttacttagtaattcttatctttataaaggaaatatatccctattataatagctttaatattatttccttaatctattattaagatagtatttacttctaaagtatttaattttatattttagtattccttatatttataatccctatattaatcccttccttttctataattacctttatatctttctctaaaagtagttagattaataatagagaaactaaattaggattaatttaaagttattttaataaggttttctttttacttcttagactaagattactataattaattctttcttttagataataaaaaatagatatagaataggataaatattagttttaatattttacctctagtctttagtaagatactattattagatataattattatatctttaagaggtttctataattttataaaaagagtttatactttctactctttaatagtttttaataggtaatattctagtaatttaaagtaggttttaaagatatctaagtcttagtataagtatatctctactttattaaataaaactaagatatctataataatattataggaattttagagtaaagttttaatctaatccttaaatacttcttagttccttatatctctaaggttattttacttataaattacctattttcctttataatctatataaaggaaatttataatagctaaaaccttttattttcctaaaatatatttttttaaaattcctttaaaaaggatattaaggttatttaactagttttttctatttttaatattataattctttttaaatattataatatctcttttaattttattcttttaactatatttactttctaatattaaattacctttatttttaaattaatttaattccttttctttttaatatagtagggtttaataagtctattcctacctacatttttacctataaatattaaaatatatatctctatatatctatatatagtactactatactttacttaatttactttgaattaaataggattaaaccctatgccaatcttaggtaaaatttaaatttaatattttatataatacccctttgccttccgtactactatacatctacgccctatactcaaaatcaatgaatcaatcttcgattatagaatagcatcctatactatctttatataccttttaaatactatctaatcctccttagaccttcctatatatattaacttaggaaataacttaaaaagtttaacctttagctaccactatataggtttaattgggtttaaatctagtaagtatagcggccactcctctatatatatcccgtgagtttcaaaccattcctatataattttagtagtatagatctaagtgttatcttactaaaagatagagtagggtcgatagaatagaagtagaccttctttaagagtatctatataggaaatagtagtatatcctatcttctttaattctaggttaataatattctcctaccttataataattaactctaatcgactccctaactagattataccctaaactatttataaaatatctttaatatataccttagtatttataagatcttttctatagccctctaaccgaaagcgctaatactattatagtctacagtttattatttattatatagaatacttatccaagaagacctagttttaaatattatttctagactactcagagtgctatttttaaataaaacaatatcgttattgagctaattcctttctaattagaatcttcctttttatcctatattttagaagactagttagtcttaaaacgttaataatagtagagtaggatagataactaggtatagtataacttagcgttttataggaccaaaaggggtgccggcgggtgagtataaaaagtaaatggtaagttcgattactaaagatccttaggcgactagttcgagggagagatttaacagtattatattctttaaactgttttaaagtattataaatcgttcggcgggagtacctaaaatcgagtgctagctttaactgggtagtaccggcctagtgggtataaataatagctgagcgctgagcaatagatagcttacctgattttatacgacctaaaccaaggatatccttggttaatgtcattggggggtgtataggaagaagaaaaaaaaccacgatggttgttagggggatagtaagtggggcagtgggaacagactttttgaatactatgtatagagaatatctaagaatagctttttatataggatttttagtagtaagggatttaaagaggtataaatttagcc

SEQ ID NO: 64 - DNA, 235282 bp, Penicillium roqueforti
  misc_feature (2719)..(5484): n is a, c, g, or t
  misc_feature (6369)..(7199): n is a, c, g, or t
  misc_feature (41344)..(41902): n is a, c, g, or t
  misc_feature (188467)..(188621): n is a, c, g, or t
agggatgattgtaagattacgttccctatcaagaaacctcggatactattagtaaatctattgggtacaggtcatatcttaaccagaattaaaaagctgaaaagacaaggatggcttaaattgaaacgactgagtcaggctgtttatcgaaattcaaaccagatttcgcgtcttcgtgcgcacctatcattcttacaagcagagctcgaaaaacggatatcatctcgaaatggttcattgaatgccattttgtgtatacaggagctgactcaagataacctatccccaaggcgaatatatttgattgggtctttgttagttcagcattatctcgagaaatggagtaaggggccagttgatagaaataggatagatgttccggggtcgaccgctctgttaattgaccaaattccttccctatacacgtgacattatttttagctactttaggcagaagtgatatcgaagtattatctcatcggtcatacaataaacaatagcacaatgattaagttaaagctggtactagctttcaataattctacattgcgacacagcatatattacttcaagcagtctaggaaacttcttaggtagcgatagctttcgatatattaaagggcattaccaacgcacaagctataggaaaagcaagctcccccattttaaaagttctatcagattcaaattacatgtcgagggacactatatacagtagtagttataccagcttggtcattgaacctatccgagaatgattatgggccgaagatctgacttcgccagcctgatcactcataactgcatgccctcctattccagcggttaatgctgtcaattatctgcctaccctcacagcacctatgtgtcgtagactcccaatctctagtagtttatcggccacatttatctactactacccatagggtgaggcggaaaatcgcgctagccttgcttatctggtttgccagaacactgtcctcgtcaaataagtaccatatcttaaagttttatacaagtgcttccttgaattgcgatacaatatggttctcagttatcccattaattgcaaaatctccctcggttgagataactcctttagcttcttgcttctagggttaagaacatcctacagtattacagtgtcaaagccatccttataatggttagcagtattattttctattagtggttcaaccgtatgattagtccatcttttctactattacattgccaacccgtagatcgtcattcggctaggagtatgggaaattctatacaaggctgatagcagatagtagagctaaacattgctcgcctctatagtgcacatcctgtgtggatcggaacttctcgataactatgtctcctgtaagagtttgtattagtgggctcctacatcgcatataagcttgtggagagagctactgtggtacaccaagtatattatagttttcacgtagatatatagaattaaggaaattcctcctctagaaatatcactatagtagagtgaccagtcgtactcaggctacgataccaggctagcagttcgaccatcatcttctaccctacaatgaggcttgtaggtcggtgtacattctcctaataggctcgaagacaacgcgcgctaaacgtgatccattcactaggcagagctcttcgcattccacttaggcttcacatgctctttcaaccaggttacagattgtgttctgaaaatttcggagaagttgatagacaaaatcagtcgagcgctcggtgccggatttataaagcctttgtagttcggtgaacgtatgttctgtaagctcttagagtagcttgaaaagggaatagcaatcgcggtaatatgcattataagcttattattagccgatctgacgtacaatctatacaatatcctccatggtactatcacagaagagagaaagaatcacaatcgactctcaggttctgtatttacataatgagagataccaattacatagtcagagagtcggtcggtcggtcggtcaagttgaatatcggtaaggcgaaaaaggaacttttggcaacccaatataaatatactcatttctgaggttccggctattaagataggtggttattacagagacaatggttcctcgcttcaccgtcctatccctcaacaacgcgcaaagcgtcattgccatcctctatatacccccataaacatcccatctcatagtcaataaggacactctgagacccactcttgcctacaaagccaaatgctcgcccgagggattactgctcgagagagccggtacttactttgacttcgcaaaatagacactctcaattaccgaaacctacgcaactatgccatcggtatcattgtgggcattcttggattctcctactttgttatttatttactattattcttgattttccacttcccctcgtctcaacagtcaatcctatacactctggcagtgatagcgtttggtagaggaagcgccatatggtatctagatattgtctttcaaaatagcttcagtatattccagaagacaaaagtaacgaaagagcaagattccatatggtttagtggtttattcctggtctagacagcagctcttcccacaatcgcttttctctttccagcccaaccactgatacagcttggatacgcatcggctttcaccctaatcgctattagaagcctctcggacggttatctcaaagacannnnnnnnnnnnnnnnnnnnnnnnnnnnnnnnnnnnnnnnnnnnnnnnnnnnnnnnnnnnnnnnnnnnnnnnnnnnnnnnnnnnnnnnnnnnnnnnnnnnnnnnnnnnnnnnnnnnnnnnnnnnnnnnnnnnnnnnnnnnnnnnnnnnnnnnnnnnnnnnnnnnnnnnnnnnnnnnnnnnnnnnnnnnnnnnnnnnnnnnnnnnnnnnnnnnnnnnnnnnnnnnnnnnnnnnnnnnnnnnnnnnnnnnnnnnnnnnnnnnnnnnnnnnnnnnnnnnnnnnnnnnnnnnnnnnnnnnnnnnnnnnnnnnnnnnnnnnnnnnnnnnnnnnnnnnnnnnnnnnnnnnnnnnnnnnnnnnnnnnnnnnnnnnnnnnnnnnnnnnnnnnnnnnnnnnnnnnnnnnnnnnnnnnnnnnnnnnnnnnnnnnnnnnnnnnnnnnnnnnnnnnnnnnnnnnnnnnnnnnnnnnnnnnnnnnnnnnnnnnnnnnnnnnnnnnnnnnnnnnnnnnnnnnnnnnnnnnnnnnnnnnnnnnnnnnnnnnnnnnnnnnnnnnnnnnnnnnnnnnnnnnnnnnnnnnnnnnnnnnnnnnnnnnnnnnnnnnnnnnnnnnnnnnnnnnnnnnnnnnnnnnnnnnnnnnnnnnnnnnnnnnnnnnnnnnnnnnnnnnnnnnnnnnnnnnnnnnnnnnnnnnnnnnnnnnnnnnnnnnnnnnnnnnnnnnnnnnnnnnnnnnnnnnnnnnnnnnnnnnnnnnnnnnnnnnnnnnnnnnnnnnnnnnnnnnnnnnnnnnnnnnnnnnnnnnnnnnnnnnnnnnnnnnnnnnnnnnnnnnnnnnnnnnnnnnnnnnnnnnnnnnnnnnnnnnnnnnnnnnnnnnnnnnnnnnnnnnnnnnnnnnnnnnnnnnnnnnnnnnnnnnnnnnnnnnnnnnnnnnnnnnnnnnnnnnnnnnnnnnnnnnnnnnnnnnnnnnnnnnnnnnnnnnnnnnnnnnnnnnnnnnnnnnnnnnnnnnnnnnnnnnnnnnnnnnnnnnnnnnnnnnnnnnnnnnnnnnnnnnnnnnnnnnnnnnnnnnnnnnnnnnnnnnnnnnnnnnnnnnnnnnnnnnnnnnnnnnnnnnnnnnnnnnnnnnnnnnnnnnnnnnnnnnnnnnnnnnnnnnnnnnnnnnnnnnnnnnnnnnnnnnnnnnnnnnnnnnnnnnnnnnnnnnnnnnnnnnnnnnnnnnnnnnnnnnnnnnnnnnnnnnnnnnnnnnnnnnnnnnnnnnnnnnnnnnnnnnnnnnnnnnnnnnnnnnnnnnnnnnnnnnnnnnnnnnnnnnnnnnnnnnnnnnnnnnnnnnnnnnnnnnnnnnnnnnnnnnnnnnnnnnnnnnnnnnnnnnnnnnnnnnnnnnnnnnnnnnnnnnnnnnnnnnnnnnnnnnnnnnnnnnnnnnnnnnnnnnnnnnnnnnnnnnnnnnnnnnnnnnnnnnnnnnnnnnnnnnnnnnnnnnnnnnnnnnnnnnnnnnnnnnnnnnnnnnnnnnnnnnnnnnnnnnnnnnnnnnnnnnnnnnnnnnnnnnnnnnnnnnnnnnnnnnnnnnnnnnnnnnnnnnnnnnnnnnnnnnnnnnnnnnnnnnnnnnnnnnnnnnnnnnnnnnnnnnnnnnnnnnnnnnnnnnnnnnnnnnnnnnnnnnnnnnnnnnnnnnnnnnnnnnnnnnnnnnnnnnnnnnnnnnnnnnnnnnnnnnnnnnnnnnnnnnnnnnnnnnnnnnnnnnnnnnnnnnnnnnnnnnnnnnnnnnnnnnnnnnnnnnnnnnnnnnnnnnnnnnnnnnnnnnnnnnnnnnnnnnnnnnnnnnnnnnnnnnnnnnnnnnnnnnnnnnnnnnnnnnnnnnnnnnnnnnnnnnnnnnnnnnnnnnnnnnnnnnnnnnnnnnnnnnnnnnnnnnnnnnnnnnnnnnnnnnnnnnnnnnnnnnnnnnnnnnnnnnnnnnnnnnnnnnnnnnnnnnnnnnnnnnnnnnnnnnnnnnnnnnnnnnnnnnnnnnnnnnnnnnnnnnnnnnnnnnnnnnnnnnnnnnnnnnnnnnnnnnnnnnnnnnnnnnnnnnnnnnnnnnnnnnnnnnnnnnnnnnnnnnnnnnnnnnnnnnnnnnnnnnnnnnnnnnnnnnnnnnnnnnnnnnnnnnnnnnnnnnnnnnnnnnnnnnnnnnnnnnnnnnnnnnnnnnnnnnnnnnnnnnnnnnnnnnnnnnnnnnnnnnnnnnnnnnnnnnnnnnnnnnnnnnnnnnnnnnnnnnnnnnnnnnnnnnnnnnnnnnnnnnnnnnnnnnnnnnnnnnnnnnnnnnnnnnnnnnnnnnnnnnnnnnnnnnnnnnnnnnnnnnnnnnnnnnnnnnnnnnnnnnnnnnnnnnnnnnnnnnnnnnnnnnnnnnnnnnnnnnnnnnnnnnnnnnnnnnnnnnnnnnnnnnnnnnnnnnnnnnnnnnnnnnnnnnnnnnnnnnnnnnnnnnnnnnnnnnnnnnnnnnnnnnnnnnnnnnnnnnnnnnnnnnnnnnnnnnnnnnnnnnnnnnnnnnnnnnnnnnnnnnnnnnnnnnnnnnnnnnnnnnnnnnnnnnnnnnnnnnnnnnnnnnnnnnnnnnnnnnnnnnnnnnnnnnnnnnnnnnnnnnnnnnnnnnnnnnnnnnnnnnnnnnnnnnnnnnnnnnnnnnnnnnnnnnnnnnnnnnnnnnnnnnnnnnnnnnnnnnnnnnnnnnnnnnnnnnnnnnnnnnnnnnnnnnnnnnnnnnnnnnnnnnnnnnnnnnnnnnnnnnnnnnnnnnnnnnnnnnnnnnnnnnnnnnnntgcgaacggacggaattaatatcgcactttgcacccgcgatatacaatcattagccaatggcatccatagggtagcgagtgaggtcttagattaataagagcacgcaacaggatctgaattcattagtaatcgtgcgtcaaaggcagcattgaatataatatctaatgatataccttacaatttagtaccagcttcatctagattcaaatcatcatcggtattatgatattatccatagactgtgaacgtaggctaccagcgatataagctgtaagagcttcgagctaggggcttgataaaaggatttcccagacagtaaataccgagacccttactatagtttaaaccgacaattataacatacattatggctttgatttctcatattttcacccataattactatgtttatttagttcattcgaaaaatttcactctgtcaaggcagatatggtagtcaacttcgtccaccacaattgtaacgtggcatttacttcctaaagtactaggtcgctaacctcctacccaccttttaatattcttctatctcggtctaaatcttagcttaaattcaaattccatactgacctcatacatatattcaatcgcgcatcaaaacatagaaggtagtctaacgatcattctttatataacacaggaggccacgtcgcgataccaagatactttcaagtacctactaagcctaccgcttaagtgttagtactggaggttcttatccctcagacatatctatattatagtggacgctagatagataccctttctactgagtcttggcagcaagaaaagcctttcacccatagcagggacccgagtagaaaaccaaggctgttacagtctggcgtccagtagagccatcagannnnnnnnnnnnnnnnnnnnnnnnnnnnnnnnnnnnnnnnnnnnnnnnnnnnnnnnnnnnnnnnnnnnnnnnnnnnnnnnnnnnnnnnnnnnnnnnnnnnnnnnnnnnnnnnnnnnnnnnnnnnnnnnnnnnnnnnnnnnnnnnnnnnnnnnnnnnnnnnnnnnnnnnnnnnnnnnnnnnnnnnnnnnnnnnnnnnnnnnnnnnnnnnnnnnnnnnnnnnnnnnnnnnnnnnnnnnnnnnnnnnnnnnnnnnnnnnnnnnnnnnnnnnnnnnnnnnnnnnnnnnnnnnnnnnnnnnnnnnnnnnnnnnnnnnnnnnnnnnnnnnnnnnnnnnnnnnnnnnnnnnnnnnnnnnnnnnnnnnnnnnnnnnnnnnnnnnnnnnnnnnnnnnnnnnnnnnnnnnnnnnnnnnnnnnnnnnnnnnnnnnnnnnnnnnnnnnnnnnnnnnnnnnnnnnnnnnnnnnnnnnnnnnnnnnnnnnnnnnnnnnnnnnnnnnnnnnnnnnnnnnnnnnnnnnnnnnnnnnnnnnnnnnnnnnnnnnnnnnnnnnnnnnnnnnnnnnnnnnnnnnnnnnnnnnnnnnnnnnnnnnnnnnnnnnnnnnnnnnnnnnnnnnnnnnnnnnnnnnnnnnnnnnnnnnnnnnnnnnnnnnnnnnnnnnnnnnnnnnnnnnnnnnnnnnnnnnnnnnnnnnnnnnnnnnnnnnnnnnnnnnnnnnnnnnnnnnnnnnnnnnnnnnnnnnnnnnnnnnnnnnnnnnnnnnnnnnnnnnnnnnnnnnnnnnnnnnnnnnnnnnnnnnnnnnnnnnnnnnnnnnnnnnnnnnnnnnnnnnnnnnnnnnnnnggtagttagggggcggggcccgccatactggccgatgaagtctcaactcttgggttatttcttttacaataagaaaagatataaagagctggggctgatacttatagagacacagcagaggtcaattcagtatcacaccgggccacagtgatcatcataggcgcgataagttggtcctttagtggtatcaagacgtcagtgttgttcgtggtttagcctacaaggcttagcacaaataatcagacccggcgcagcagtaggcgttatatctcataaaccttagcatagaataaaatagaagtctcataatttcacataacagagctcgcacttgaaagtccacaccctattgttaaccagatattttaatttacaaccttccactctaggcatactgcattattcggggccaggaatagtatatatgccatggctttacgtagagtactgccagtagtacagggttatcagggccgctctggtgagctcccaaaggttcactgtcaattatagtcaagaccagggattaagagacaacaagaagccgtggcccttgccctagtatattgtggtcgaacttccacggatctagttgccccgcgtctttcgggtcagcgcatttataaggatttgtgggcttatatacctacagtgtaagcagttatacttcaaacttaagatacaaccagacccacgatagtagatcagctcagtcggctactatagcagagacgtcttcgtatagtagataccttaactagtcaatccaaatctttgatcttcgatcggctggctgaataggtcagtgaatcacgtctcttataatataggaactgtctgatctactagtctcgatatatactacaaatgtcagtacagtacaaatcccggtatataccggtccaacgggagaacttatcgagtgcatcagatataagcctctcaacaggatcaagtagataaatcgtagagcaaattgcaggggtagaggacacatctacaggcttctcagtctctatcacttaccaacttggtagcaattaccaaaagacatagttcttaattgaggcctattaagacgccttatacatttggcagtaactatttgcagcgatatctttaatgtttttacgtacttagcgagagagacgagtaaaagaggtattagcaatgaaagggataccgagttgttttaaactaagtggctctgtccgtctagactacggaaagtgaggtcacagtaggatatatgggtgctcgacccattaacccgttaaagcttggccaaacatcgtcaacactcaatttttgaagttatcaccaacctgcgaggatatattcttttttttttcttttcttttttttttggtgactcttcagttctataatgccgtttgccaagtttttgaggcttccaacgaaagtagaagtaatatctagttgagatatctttcacatcaatagccgtctatatctggccctcaacattatcaggcttaatcagttttcccgaccgactcgttgatacccccaagcgcccgctaaaaataagagcaaattctactcagaagctaactctattgattgactgatacaaggatcgtaaaacacagtctataaccatatacgtctacgttatctataagaggcaccaagaatcgatggaaatggtattgccctactccttgactttctcctgcaaataaatggattccctaaacagctcgccaggccaggaaaaagaaggaggacagcagcccagtgaatcgctagtccttagtgacagggaaaaatcaatggaaaaatcactagaaactcctgactatatccctctatcggtaagtaaaaccatttagcttcatttacttttgctgaatattgcagccctcccttttacgacacgataaagaaatcaaacatactttagcgatcgagccctttcaacctattataaaggtactagcagacttcgaacgcgacgatctcaagttcgcctttcccgcggctcgactggtcggactctatagacgcctgtaggagtcgtgcgtgtccaagcatatcgatggccagaagctacagcagagtaatcagatattaaaggaggctggtacgcacctgagaagagagagggacggtcttcagctataccacaagaagcagctagctcaactgcgctttttcgaacaggctttagaatcaactcaggaacgactgattagtctactcaatgactagaactacccttccaaacccaatctggcagggctaccaggcatggcaaaagaagggtaaaggattatacattcttaatcgtcctatatcttattcttacacaagaaatatccaccaatatcgcaaataagagaatcatcgtgtaaaaaagtagctttttttcattctcctaaacaaaaaacattcatgtggaggcggccatttctggcgtcaaagggggccgaaagtggcctcctcggcatagctcttccgcacacgtactttcggccccagagccacgcgctcatcgcctacccctagagaactctgtatagagacaaacgaatttaacgctatagtacgcacgacattacgttatcattatcaatacctccctcgcactcgcattccctaaagttgaagttcaagaagaacattcttatcaactgtttttttaagagccgcaatagcaattgccggcaaaactgtcagaaatgcaatactctcatcattgttcagaaattcttaggcgtagcatgaaattgccttaattatggcatcccaaagctcagtctcaagaggtagaagagtggcccagatctctcacataacaaatggatatctctaggcatttttgtcaatccagttgacgagacgagttcttacaagctgttttaggggcgcaatgtcaaatttgtcggctgccataagaactcctaggttattccacaaaactgcgtgagaatctttatcttcgcccgagacagactgcaacagattatagcgcggtatactgcgaacttacagccttcgcatgatatcgttaggtcggagtacctacctgattccaggaggctttgcaagagtagttgaagatctggaaaccccatataaaatgagagtagtaaaataacatgagttagtcaacgcaccgggcatctgtcatccgatggtttttataattgcccaactatctgtaatcctcgaaggtatataacgtcaaacccacgacaccaagttccgcgtataacgaaagtagaaattccagtggcagcccatgtactccgaggaaccctcacttaagccccaggaaaagacatcgggtagctacctttatatatttattaatatggatacctattggctacaatgtgctcaaattcactgtgccaggtttcgcgctaggtaggctgggagtggtacaaccaaaaaattccaagggaatatataccagagcaaccattagtagacataggcaatgtttaggttaggatgataaggtacagacgcttaataaattgtctaaaaacatatgagtttagattcgtgtacaatactatatcgaggaaagaaaagaaagcctgtattatcctaccataatcgaaacactatggtttccatctactccatttcccgtgcccaagaaacgccctcaacgactatatgattttaacctccaataggtactccacattcagggcatctagcttgctccatcggcataccgcactctccaatagcaaactatagaaaaaattatttagttcgtcaaaggtaacttagggcaattcgaggaatgggaaatttactcaccagatgtccagtagtgataaggtacagacgcttaataaattgtctaaaaacatatgagtttagattcgtgtacaatactatatcgaggaaagaaaagaaagcctgtattatcctaccataatcgaaacactatggtttccatctactccatttcccgtgcccaagaaacgccctcaacgactatatgattttaacctccaataggtactccacattcagggcatctagcttgctccatcggcataccgcactctccaatagcaaactatagaaaaaattatttggttcgtcaaaggtaacttagggcaattcgaggaataggaaatttactcaccggatgtccagtagcgcaattgtaccagtgcccagaataagtcgccattcctcctcgtctactaaccatggccatcttgattaactgaagttcttctaaagtgattgtttcgtatcgcgtttcctcatagaggcggaccatctcctagaccttttgttaaagctcaggacagttcctcggttcgtcgcatagttttaacgcagcggcgaggagatcgtgggtggtttagaagtaatcttagagattttctagaccaatttttcctttgagatatagatcgcttattgtttcccctggataagagcggtgataccacgcgtccagctgggcgatcttagcgaataagatggtcgccgtgatgacgatgcgggagaaatttccttcgttggcttgagttatcaagtctcgacaatccttcagaacttaaatcaaggctaatgatagtttggcaaagcttagaagtggtagcgttacagattttccgcttgaatctatcactctaaaggcatcgctaaacatgacttccttggacctgatataaattaaccgtgcaccgagggtgatttggttatcggatttatattgctatattcatcgcctccattcgggctgagagggaggctacatcgtcccttggtgacttctggtagatcgcaatcgcatccataagtcgtttcatcggctggttctcggcctccatggctttgctgagagctgagagctagagcctccgtgcatatcgtgcttcatgttgtaatttagtctccctcaccgccaccaacgctcgctcagagttgagcttgtcttcaatgtcattcagacgcgattcatggccttcaaggtctgtgcgacccttgataaggaaccgcttacaagtctcatccataacagcacggttgataacacgattttaacgtttcgtcacaaactgacgaatgggctgcttacagtccgatcacgatggtatgacactggcaagagaagaagagacatcgattgaacagacgtcttggagaccgtcaaatcttccatctttatctttcgtgtatacttcatccaggccaaccaatccatcaaccgactcactgataatgaaattgccgcatccaagcacgatgataggagtttcatcgagactgatttcggaataagttttccattcgaggaagtcaacacgagcgtctcccttgtcgccggcactcttgacacagattgtttggacagtcttccccgcagaggctcgggcattgatggccgcatctgaggatcttagtgcatcgctcattgcagggaagccgttcgcatattgccgcgcaacgcattgagcaggagcctcggtgtttgcaggaccaggtgcatctctcgatgcatggtgcacatgcctttctgcaaatcaagtcgcatgctgagtgtgagcatctaatctgtacatatgattaatgtctccgatacgatgaccagacgatgaattctaggattctgacttcgcaatttgcctcgcagtaaccacagctctcctcatcatgacatatcttcggacagctatgattgcaaacaccgtgggggcggtcacatcttttcgtgcacttcgggtactcaaatactcttcttccgtcatggacttcctcgagacaatttccgcagtaatcactgcagttgtggccacaactgagaatgtcgctgcagggcttagagcaacggaagatcggggacgtgacatctttgtaacagccaacctgaattgtatggccacacttaggaacactcttttcgaccttggcgtcgcacctaatgactttcaggttaggcatttgatggcaaaagatagctttcttgatattaccacaaggaagctccacgtcttaaatcttcgccatgcagggtcataatcttcactataaagcttggggcattcgtgctcacaggttgatcggatacatgggcaaggtttcccacatgcaaagccctcatgcatgaccgccgaatggcactcagcctggcattgatgaacacatggctcgggtcgacgggtacacgggagactgcacccaccttcagggctcttcttctcaaagtcatgaggttcataacagagaataggcttgtctgagtggcgaggacaacagagagccaactccgtgccgactgcattcgcacgggcgagctgagagtggacatcggcccacattgggacattgagctatgtttcagcatttccaatcagatacatgccgtgctaagctcgactgaggagcacgttaatgcggttttcggtgcctaggaagccaaccttgcgctttgagttgctgcggactagggagacaacgatcacccttgcctcctcgccttggaagttgtcgacggtagcaaggcggagcgtctggagcaacgtcttcttctcgaatgccttgcgaccatttggctcaggatattcatcttcaaatctcccaagcccatctgtggccaaggtttccaagtcccgctcgccgagacaaacttcgaaatcattggttagcgatgccctgagcttccgcagctgcccggtatagggtgccaaaagggcaatatccatgctcttgtactctccctgcagaacaagatgccgaacaagaacagtagccatatcgacttcccactggttgctatgagacttcacgcgactgccgtcatctcttgaatcttcatcgcatcgatggtccagccaaatgaggttgttccacattccaacaatcttgggtagattcagcacgctttcatgatcctcaagttttggatagacgctcctgatatgttgcgagatatcgggtctcattcgtcgccgtacattaagctgtgcaatacgggcaggattaagacctggttcaccgagagcgcgtctctcaaactggcttctctctagctgccacgtctttcttgtggatgattcaagactaagtgaatgtgtttgaatctgtggtcgcagctgtcgatgatccccaatctgaatgaagtgttcaactcctgacatgagggctgagatgacgtgggcttccattatctcagctgcttcctcgcatataatgacctttgttcctactcggcgcagtgtctcgatatggcgtgcaagggctgtggttgtgattcgtactacatctacttgaatcaaggctcggcggttgatctcttcgtggactgcattggtgtctccgcgaagatttgcagcgcgatcaagagcctcgaaaagcgaagcggtttcgatttcctgccactgtctgaaccagctcattgcaagaatctggcgttccggtatcgagagactgtgaatattttcattcgcagcgcgtgtgaggccttccaagcgcacatcgtcaacttcactctcattctgggttttcatcgatttggctccaagccagttaggtaatttatcatcagtgacagtcgtgaatccttccgtgtctggtcgctccagttgttcatgtatgatgggccattttcggtgcaagaaatggtccatcgcggcccaagacaggcctttttgagactggtgtagaggtttcattgcatatccagcattattcatgcagtcctcaagtctcccgtaggacataccgagggtttgcgactctaccctcgtcttcccaatgcctttactgacaacgcgaaggttcttgccttcaagctcagtggcctgactgcggccaccaatgcgtatgattttctgataccaacatcaagaagatgctttaagaattaggcttagcttttccttttcgttgatctcaaggagaacttgaacaagcttaacgcccaaataggactttccggtgcccggtgggccttggatgagggcatactctcgtgtgagagccgcgataagtccctggcactggccatggtcgagaccagtttgagtttgcagcttcaagagattaatagattcaggggtaatagggtccaatgcaaccttttcggcgccaacagttgtgatcgaagtcaggggaaagataagtttacgcgcctatgccggtgggggtacgctgtgaccatcttcgtcatccttacagcctggcaagatccatttttggaatgccaactctccttcgcattgcagcctatcggctttatatcctttgatcagacatgtttgcctgatgcataccgtcctagggcacggggtattctcgcgccattaacatgtattagttaatttgcaccgaaattacgtcactgctaacgtgacttagggtattaccctttcgggtaattccctatctgtgtttttagccatttcttgaacttacgcttaagatgtacattacctagtgaaatggtttgatatatgttgcaaagtctcataaatggtttggcgtatggctgtttctctctatctttgattttcttacatttttatagccatggggctacggatgcggaagagacaaacgaaagatagttacagtggtatttcacgcttatttgcaatccagcatctcaatttctgaccgtctgaatacctccactttgagtgtcatgttattcatgatggtttgtctttggttcctcgccagttaaaataaatgtttaactgattgatcccaggtctgaaattagacaaattagtatttccaagatacctcacttttggatcgggataggctcggggtaggctcagggtagctcagggtaggctcagggtaggctgggctgtggcaaaattgggtctcgactccgatggggggaaattgtgtaagttccccgcactgtattgtcacacttagttatccattacccgccactaccgctatatgttttttatggtaactttacaccataccggaagaatatgttgtaatacactgtaatcgtgccacgccgccaacacaactttcaacacgggagagtgttgatgggccgggggcgattacatagatcatggaccatcttaatagatcctcagatcaattgtcttatcactaattggtcttcctcgatactgcattttagtagtatgcagtatactggcggatatcattaatttggctgtaaagtgcagggtgtatatcaccggttcgaacacgcttgaagtccggtgcccgttttacttgtcatttcaatctaggccttagctgtggtattataccacagtttcatgattcggatagagggtagatgagggtagatacataccaaaggcccggagataaggcacagaaaggtgcactggtggcctcgtctttccatcagcaatatgccctagctctggtttaaggtgtcaagggaaacgcggctcagtaaatagaggggaggcgtggcctggcatgagatgaatataatgcttaagatgattacattcagtaaaggaacgaagagcacgacatgacaaaggtggcacatatgacgataccccgttccttccgccaacataacgtcttttacctgaaattggccaggtttatggaagagcaaatcaaacattgttgttacatggcaaagaccagctttaccaagatctaaacgagtttatagatcccaatcaagatgacaagtattgcacccataaccttgaactacggaataccccgatagcatcttcatcaagtgaggaaacggaaacttcttcctattcatgtcagaccaggggctgtttaagaagagcgaatgacagtcccatgcactctttccgcatggttcagtagcgcggactttgactccaacttctcaccgcaaaaagagcactcatagtgcatgtcattcggaaacagcttgatatgctttttgatggagtgtcggctcagagatccagagggcttgtacatccacaagcgatcgctttgtggcagaccagggctaccaaggcaaatgaagcaagtcgttggtctttctgttggagatttaacgcaggccgaagaaatagccttcgaaaaagtatcgtcgctcttatctgaaagggttggattctgccttttaggcaggagggcggctggtggcatatcgacatcattggtagagcatttttgggtgacacaacgccgcgagggtgcaccctcttctgcatccataccgcaatcactgcatttatcgcagcaattcgacgctcatattctttctcatgcatcgtacccagcatcgtcagcacagtgtcaataagtatcctgtaagaaatttcatcgtgaagatatcggtgtacccacgaatataccaattgttggatcatgtctatcgtgggaaatacaacggcttcagcgctatattgctgtttaaataaagcgtttctttgaattcacgcactttcttgacaacttaaataaaccagctagaaagttgcgggactaacaagctttttcccgaagtacttccattgaaacaatctgcatcaagcccatataagacagaagacattggaaaatttcccgaaatttcgtttatgtccacacaaagtaggcggccagaggtatctgtggaaactttgaatgtgtgattggatatttcgcaagcgtgctcatatatcatcatgccttgaacgcggcacacttctatatccagatatggatcatgggacctgggtctttttctagtgcaggctcggcatatagtcgcaattaaatgagatgatggttctggctttgttttttgtagtgaaggaagtccaattgttcacggccttcatactcaatcaacaaggctgccggacacctgcggcactaaataagcatgtgaccacgtgtcaagtccagttgtccctttgcagataataagcagagttcgaaatgcatcaaccaaatttttgactcacatcatttaccctcatgaatgttgcgtcgtcagatggggcacttctgaccgttgtttcagactgtggtgtatcaaggacaaatccacttgagttttcgtcctcgtaggggccttctaataaatctttggactctgaaatccctgacccaatagcctcacttgattgaatagggtattcaacttcagtttcgatagcctcaggtgatccaacattattttcaacatgctcgggcccgggcttgggttcgggtgcgaagctggcaggtggtcttgcatcgcgcgaaaggcactttgaacaaatgtttctttcctcccatgattttaataactaaagatgggtgggtatatcttcactgatttgaagtgtaagaatctgcggaggtaatactataaattgtcgatcatggtattgctctgattttattactatgactcgttattagacatcttggctacgagtggtcatcaacgtgtttcttcaaaatcaataattgcgcgatcggatgtttgcatattgtacacgcttgacctcgctttgtaagacacattcaagagagaaacaaaaaaacatcgaatattcaaggaaggggtaggccaagagctggtaaaggtagactggagacagttccatgtattcttcgcgcatggttcaggagtcccgtttttgatatcagcctttccccgcaaatgttgcaatcacagtgcatgtcatttgggtacggcttgatatgtttgttgacgaagtgtcggctgagggacccggggttcttgtacattgtcaggcggttgcgttctgacgatctagtattaccaagacaaataaagcagatcgttggtctctctcctggagatttgacgcaaacagaagcgatcgccttagagaaagtatcaccactctcatctgaggggatagacgtctgcctcttaggcaggggggcagcaggtggcatatcggcagtatcggcagtgcgtttttgcgggacacgaggccgcgagggagcaccctcttccgcatcacagaccgcaatcactgcattgattgcagcaattcgacgctcatattctttctcgactgttgtacccggcagagtcagaacactgtcgataagtgtcatatgatgcggtgtcatatagccggtacgttgcaacgctcccataacttcttcgtcaacaatttttccggaaagttgccgctcactgtcgatcaccggctgttcatttttgtaccgctccagattttcacgaattaatcggtgcttttgccatcccttctcgtttcgtaattgcttcactgtgcgaccataccgctcgtctgcataatcaaatttctggcgtagctttttgacacctttctctttagccttccaccgcttgcggattgttcgggaatgagggccactctgcggtgggttatcgccgaactcctgctgtaatgcagcgtgcgcttcttcataggtgcgcttcgtagcatctcgaatttgctttctcgtctgttttctatcttccagggtacgcacacggggaatatcattgatacagctcgaatcctcaagccgatagggtctgcgaggatcaatcgatcgactcattgagcaggcaaaccgcatgagctgtttctgagcgggcatgccccgcacaattgcctgggcatctacgtggatacccacactatagtgccggacaaaagtatcaatgctggcgtgctgcagcatcacgttctgcaattcatttgatacatccgctggtagagaggaacgcattagccaaaaattcctatatgcacaatgtgtcactcacaactatcgttgaacgcttttgctgcgccatatcgaagacaatatggcttcgctacttccgcgaagcccgtaatctcaccacctcgtttcattctgtaacgcagccatgacccggtaagtcccttttcgagtatgattcgaaggctattagcctctcgtactgcttggcaaaacatattctaatcgagaatttcgtcctttagctttaattcctacttactaagtctatctaggatccgaagatagtacaatttctcgggatagtctatcacagggctgtcttttaatagacttttaaatgcactaattctgaatagtatacctagtaggaaaacataaggactaaggactaacgtaggattaaagatgatctccagaatcgggaatgtgtttctggttgaaaatgataagtaaaagggcgctgagaagcagtggctggaggaaagacaagcataaggaatggcttagtgaggggatattcttacgactcttttttactaagaaatgattttgtgaattccggtcttaagtagatgaaaagtcgaggatatcctctatttagatcctaaaccagtgttaacttaagatcctggaagcgaagttttagtagtgccccgggacggctaccggtaatggcggccagctggcagaaaaggaggagttgtatccggtaccagccacaaggaaaagtcatctctgtcgtggataggatcactcgggcaaactcagccacatcctcgacatacatggtcgctttcggtcgacctttgagggaaagtttcttatctgaggcaactatcgcgagcacctatggaacgtcagtcgcggaccatttatgccgatatcgatactcaatcgagatctcacatcgcggatcttaacttggatatctttgctgagctcatgtccaacctcggccttgtagatcagatgccaccacttccagaataagtcgagcgagcttttggtcttcactccgggggtgcgacgtccatcctttccccgtcgctggtcacaccgccaagagaagagagccttgaggaagcgtaccgtctcgtctgtatcagagagccagaacaaacattccaccggaccgcgctttgtgccattacaaaatctagaacaatcagcgagcccagtaatagaagcgggatgttgcaatgatgtctcacctatcccaaaaatcttgcgtctcatccaatttctcctgagttttcgggctgtagcgtttctgtcggagctgggagacatcgagagactcggcctcctggagatagtattctggtggaagttgctcctcctcatcttccgaagccagctcatcttcgggctcatcttcagactcggattcggattcgctgctcgagtcgaagacgctaggtgcgatggaggaatcagggtcggaagcgttgttcgagaagatctcaggtaggcgtgagctagtgtcgctcttatcgtcagacaaagcaggccacggagaaggcatggcagcgggacacagtatgggattgaagaggggcagcgaatacacccgttggaaacccagacctggggctggaggggttgctggagagcgaggtaggactgtcggtcgggggccatggtggtcgatatttatggaaactcagggaagcagaacggtcaacagaggagccgaaaatggctcccctccgccagaaaattgactgagggtgaacgaggatggggccctacggcgacgaatggacatcggttaatcaatgggcccaggcaccaggcacgtccaacccgagcacaggtggcagtaaatggggttgtgcgtgggctttggtgcaagtgatgccaagaccgaccacggtgagcgagcggcttaaaacggcgtcaaaagcggccgtttttggcctcctgctcaccgtgtcatcgttaattggagtaataactgctattgctattattgatattttttttgtctgacttctaccttcttaggtttccttattaggtatcttagctattattttcttccttattagcttagaaagttcctatactagtagctttattagggtatctataatgttttttatttttaatgtgtcttaagtctaatgattccttctctaagtatatactgtaccttgatttttttctcttttctgtctttccgacggtatctgggcatactgttattgcttggtgctttgtccctttatctttatggagctatccatggtagtaattagatcatcattagtaacatcgtcggcaatatcttactcttgttgatcactccttttctccgtcatgtagacacctaggtatatcaacttttcaattgcgctaaaccggtaaaatcgaaaaagaaagagcaaagggggataatcagaacacgcgcaaaaaaaactttttcccccgagacaatactcgatgggtaaatcctgagacacgcgatcgctaatcatattcaacaaataatcgacgctttatccgtgcgagcagtatcgatccttgtcatcgaaatcccagtattgcgggacgcaatgggctcaagggtatcatcaccattcgcaagacgctcctctcgctcccattccaagcgctcagcctccttcatgatcttgagctcctgacagaacttgctgttcgctctgatgcggtcaccgtagcgaatgaaagcaaacggaattacagagacacccatactgaggaaggcaattagactgcaagcccaaggcacgccgagtcgattgaacatcggcttagcagcgagcggaagcaaggcacctagaatgcttcgtgtgcagcttgcggcggactgtgcgctagcggagagggtttcgtaggcgtcggtcaggtagttcagcatagccatgaaaattaacagatagcccattccgaaggggatgccggagaggaagggtacgacccagtgaatgtttggcgaggctgtccagcctatccagaagagggagatcacgtataggggtccgccgacgcaggcgagggggagtctgcggtattcctcgatgaaggcccagctggcgttgcgggccttcgctcgggctaggtagccatcgtaccagatgaagacgccacaggcaagcccggcgccgataccgactgttgtacagaaattagaatctacttcttttttgttggagaaatggcgtatggacgacaaacttactaggcagaaacatcaagccagatacaccagggctcattttgtagatacctgcagatttccgttagtgtttatgtccaacagggttctgcatacgctagcggggagaggtcgccgaccttggaagataattggatatgcctcaaagtagaggtagaagattgcgtatgccagagcaagatacaatgaactcagcgaaacgatatactcatgaataatcatgcggaatggtcgcgagatcgtgataagcagcatttctggcagattgcgactctggaggtccaatggcgatacgatgcttgaattgccggtatctttgcgtagcttgtgcgcacggcgcttcagaatgaccggggcataggtttcaggcatggcgataatcaatggcaaggtagcacccgagagaatgagtccgatccaaaaacaccaacgccagctgacaactgcaacgaagccagatacccaaggtccaatgattggcccaagggttgtacactgttaataaattagctgtcgagcccagaatctctagttggatgtatgcggcaagcttacagccatgaaataagccatcaggcgacctcgcagtgtgggatcgtcatgtacatcagcaaacaacccaccgacagtggcgataggcgccgacgcaaccatgccattgaatagtcggaatacaagcagagatgcatacgaatttgcgatagcgcacgctagcgtgaatatcatgaataagacaaaagagatgagcaaagggcccttccggccaaaatactcggagctaggaccccacagcaatggccctaaaatgtatccgacgagaaagacggagatgggcaagacgagagcggtttcgttggtgatgttgaactcttcggcaatttgggggatggcgttgctacaaatcgacgagccgatagtgctgttcatgacttgcatgacaccagctgagagaacaaggaacttcctcctctattaggcacatcagcaatcttttcttctccttgttttgtattggacaatatcccacataccgttctccagttgacggggttgtctgggtcattaagcccgaatgaaacaatcgttttggaagccactcggcggaatctggagtatgaagggttcccataacgttcttggatgggctcatgatcgacttctgagtcttggtcttcggagtcatgagagtcatgggagtcatgggagtgttgtgactcgtgagaggaagccactacgtgctctatacaacaatttcagcattttgaaattctaagatacaatgtagaaagcaccaacaaagagtataggcgactgacctcttgctgacatgaccttttgcacattttcctcgccagccacatggtccgacatcttgatggccttggcttatcaacaaagcgaaagtttggacgctaaatgaagatccaggcggattgcaagaattataaagagttcagaagttgaaaaagccacccccacagagtattagtggatgtttgactcagacaagtaaaaggtgtttaatgtgggttcaactccacattcatagagcaatctctgtggtacgccctaactttgacaaatcgagctgagacgcgagggtagtttagaaaatacagaaaagacaagccttccctgtcaaattaggtatttggtggtgttgatcagtagacctagatcgggtaggacggcttttctccaactgtttgggcaaaaaggcaggagccaagaagttgcggattgctaaagtggcaactagaattgtgactgtctgaaatatcaaattggacctcgcatagaagaccgattttcacacccttcacacgcgtcgcttgcgaaactacaaagggaatccaaacccacccatgtaaatcttgaagcaaatagctcgaccgcatgcgtctagtgatttggacattgaatcttctgtatgtaatgaagcgtgaagatcctgccgatcaattgattggtcttacattagcaattgcgtcagatagttttccctgtcaaggaagtgaggaccaatggggcaagctcgattttgggctgacgagcacttgttcccatgatatgcgtaatttgcatagacccgatcgagctacggctgatttttagtttgaagaagctccctgtagcggggacgccaatgctggggtcaacggggaacgggctattccgcacagcgtgggctcgacgtattttgttctcggagagaggttccgaaagcgctccacatagagtaaacgaacaatgccggttcaggggtatgccgtctttttcgatctgtgctgcgtatgccttgggcatcgaaggagtaatttcttgtgggttgggctgaggtcggcgaagttaaaagtgtcatttccggttgcgtgctgatgtgttcggcgacaaagccgatgtgccttgaccgcccaaaaatcatcagaagaagaatctggaagtgactcctgcagccaaaagcctctcgggtaatattctttcgaaagaaactgagtactgtgcatgagtggctgtcattattttgtcaaggggagtattggggttaatgcctgacgtaactgtcaccatattctgcctcaggcaccaaaccgttgtacacaggcgataaggcatcaccaggacccacaagtatccaagatttgtatagttattcacaggggagctaaatgtatgtaatatcatcgcttagatgcgtcttcgactttcaggaagcacaagtatctacagctgaccacaaggatattctgtcacataagctcttataggctgtatatgtcctcgttgctaaaatgaaaagactagttagtatttcaatgcctgatttctgaacataactgttcttgatgtatgaaatttacaaaggccgattgattcgattcctcccctccgcttgagaattaacccagacactgacactcatgctggccactgagaaaactccatagccgcagttattaatgagtaccgtctcattttgccagccaagaatatctgtccacaactccccggcatgtctgtgaccaacaaacatgcgcttggaggatgcgccaccgttgctaaggatacaggcaagactgaacgggtgtttatagttctcgtagcgcacgaatcctgtataatcgtaagaacaagcaatctacatccaaaaaagtgatactgaccaatgcagttccgtctattgaagtagtcccgttgtttcccgtgtgcatataactttcgcgcacgcgtgagtatgggaagcatttcgccgcatgtcccaggaggcttggatccacaattgattccatagaagtctccgtagaaaatgcatggctgcccttggcttcggaggaggattaaagagtatgcaagaggtttgaaaaatggtgcaatgatagtctgctggggtatttagttactatccacgccctaggatgtataatgctaaagctttggtctatctcacctctaatgaatgtccatcctgctagaggattgtaagctccatcatatcctcacaggacttcaacataccgtgtcatgatttccaacaaaagtctgacgtggtagtgatggttagtgggagtcctttctaccaaaataattgggtcttactactgcatgcgacggcatctgttctaccaacgtgcctttgaaaatattccgtagatcaccgcctgcgatcttcgagatagctgcaaactggcccaaaagtggcacatcgaacaacgagaccccataatccattaacttgagataccccagaagtagacccacctctcctctccagtactccgaaactaagaaataatcagcgccaacagtattgcgcaaatgtgtcaaattctttttggaaagacgcggaataatgctttactgcgtcgattcgcattccactggttggtaattcagtgccaatccactccccatttcattatatcagctcgaacttccgggtgggaatggtcgagatcggcgaacattaggtagtcgtagtttccatgctcatcactcacgtccttcgcccagtctttgttctgtcccagtatcttgtatattgcattctgctggctcgcatcgtcccagtccacaccagtaaagtgttgccagtgatacttcatggagctgtatttctccccacgtcccggaaagtcaaacccaacccaaccatcgatagtcagcggtcgagatatttcaatgttccgatctgcaagattgttgacctccatacgcgctctcatcttccatttgtcagcaggaatagaaatcaccttctgggtccatcttgacgactaagagattctcggttgaatctgccccagccttctggtttaaaacagcatcccagtaaatcccaatatccatatcctttgcagcccataccaatctctggaggtcctcctttggaccccatcgcgttgctctggtgcccttctggtcgaattccccaagatcatatagatcgtaaatatcatacccaattccagatgggtccatccctttacacccgggaggaatccagatattatcaactccgatgtctttcagatcggggattgccttgcggaggcgctgccaatggcgttgatcggctggcacgtgccattcaaacccctgcatcataagtgtgttttctgggggataccatagctgctttttatcaagtccgacaaaagagactggagaaccttcgatccctctccacttcttaggccttctccgaatcttcaaaaagcagcttaggaatgacagcatttgaccgagacttgcctctattgctgaaagtatggtattgatgtaatttggcctggttcttctccgcagcgtagggagaaggacaagaacatctagcaatcctcgactatatcatgttccccaaaagtcagggctgggcgaaactgacgagtgacactgacacaccctgctgtgcgatatacgttggctggtagaaattgaaacgcttactcgttgggttgaacgtcaaacgccgctctgtggaagatcacattaatgtttaaaccaacctcttcctcttcctggttcgtcggagtcttcttatggcacatttcaactatcctagtcttagaatatccacgccaatgtttaatgcgatgaatcagtgttatgcatagttgacgtgtagctacaatagatatatacaacatactgggtagggcaaggaagatatcggatcatgggaaccaggagtggcggtctgagagtaatgaagcgcctaaagcgcccaaccgtggaaggtgcaagattggagctcagaataaatgtcttggcggtgttgcgataacagtcacaaatggtcaatacgcgtgtccacagtggagatgtggctcgtgcgaggcaacaacgtgggggtcacctttgcggccaaccgacccttttcattattttatgcattcacagtcgtggagatcttgttctattgataaagctgtggatgctccatgtttcacgtctcacttctcaatttcctccatcatccgcttcgcgtcccatgctgccgttctctcttcttctccagtctcctccagctcgatcgtagccaactccccaaatctttccttccagaactgccacctctccttagaaaacccacattggcctttccagagcgggcctcctttacccagagcgccatcaaacccttcattccactggtagatgtctgccccgagaatactgatccacgcagcggcagcccgaatcaatgcttctactttccccggagagtattcgtgtgctggtgtttccagtgcctcgcgcagggtaatcaatgcaaaccaggagtatgcaaagacaggttctttggttgccatcaagcgtgccgtgaatttatcccggttgataatttgcgaaattgctttttgacgggcgtcaggaggtccatcaggtacgcctgcattccactcgtcccggaattgccagcctagcatgggtaggtctttccagacttgcatatcgtagagcacaatggagtccccatttgatttctttgcgtttgggagttttgatagttgaactagcacattgaccagtttatcgtggtgctcggggaaattgtatgcacacttgaagatcaagctccataggctggtaattcccccctcgaggtctgattcatctgccaaggagattgaagccagatgttcagcggcgtgctgtgcagatacactgtcgctgaataggtcttgtaggatagcaagccgagaggcaaaaatatcatctgtgatggcgaccattttgggagatggatcagaaatatgttttcgtatatgatgaaggggagtagtgatgttttaatattctgtttcaaattcgaggggctaattgtctcttatcatctgtgaatatggcctcgtggcctttatctgctgatctcattggttctgatttccaaggttgcatagcttttgacctatagtgctagttgataacctgagcacgctaatccaaggtcctacagtggggtttaaggccatcacaacatacggctttgaagtgccttgatttttttagaaataatttatgctgtcatacttgtatatacttcacagctcttactttgtatccaatcaatatttcacataccttcaatcatagttcagatagcatattaaaatgtgattatatcataacttacagaacaataattctccatgtacccatataactcatagctccaattgtatactccaatggccgcaatggccgcaaatatccaccctgacatgtcagctaatacgtgtccacagtgacgtagagggctgtggctggtaacaacattgaatcttccacctctgatagcgcaatgagttcgatatatgtacggagtagcatacagtgcaatatgcgctatacaaacagttcaattccatcaccacgagccttgaataaattcaatgtccagagccagcttggaaatgtgcctcctatcaaatccctttgcggttccttatcccgcctattcccggcaacgagctccaaccaccaaaatccacgtctaataatagccaatatcaacctcaagttggggtttgatgataatcaggatcaatataacaacatgcataacattcacccatccatgtagaaaagattagcaagacgctatacggttgaccgggcgatcggagttgagtgtgtggctgccgagcggctaccgcattggccgcgaaaagttttcgggttcggcggtcccatccctttgaaatcctttcttcttctcttcctctctctaaggcttcaattgaccattccatcctctcctctctttgacgttattctttacgttatctcacattaatcaaaatggctgtccctgtcgcccccaaggaggagatgagcgctctcaacctcgtatgttgcgaaccctgaaaataccaagctttaactgacccgattcttgcttccagtactcccgcttcgctttcgctggtgccgtctgctgcgctgtcacccacggtgctgccactcctctcgatgtgtaagtttttgaatctgtcgccggcgcgcgaagaagaatttccgctcatttccggtcctttacagcgtcaagacccgtatccagcttgaccccgtcacctacaaccgtggtatgctcggtggcttcaagcaggtcgtccagaacgagggtgctggcgctctcctgactggattcggtcccaccgccgccggttacttcctccagggtgccttcaagttcggtggatacgagttcttcaagcagcagtccatcaacgccgtcggctacgagactgccaagaacaaccgcaccgccgtctacctcgcctctgccggtgccgctgagttcattgctgatatcgctctgtgccctctcgaggctacccgtatccgtcttgtctcccagcctaccttcgccagcggtcttctccctgccatgacccgcatcctcaaggaggagggtatcggtgccttctactctggattcggacctatcctgttcaagcagtaagtttttttccctctgcccgcttcgggtatatatccgatgtaaatcccactaactcgatttcccacagggtcccctacaccatggccaagttcgtcgtcttcgagaaggtctccgaggccgtcctctcccgcgtcaacaaggagactctctccgacggtgccaagaccggtatcaacctcggctccggtctcgtcgctggtctcgccgccgccatcatctcccagcccgctgacaccatgctctccaagatcaacaagacccccggtgctcctggtgagggtaccgttacccgtctgatcaagatcgccaaggagctcggtatccgtggctcttacggtggtattggtgcccgtctcttcatggtcggctccatcaccgccggtcagttcgccatctacggtgacatcaagcgtatgctcggtgccactggcggtgttgagatcggtaaatagacgattcgagtctaatatgctcgggaggattgtagagactacccttagaattccttttgttttacgccttgtccatcccccacacacgatgtacaatattttgtctcagtttcctttcaagaacaagctcgcttttgttatatttacaataatttccatttcctcgtgaagtaaaagccttggtagtgataattgggttattgacgtctcgattgcgaaccgattggatttcaagaggccgattgagagatggcggaagtttgcgccgagactagcaatgagaattcagcgcgccatataagatttccctacggtcaatttcaaccgcctgttcactgcgctgagctattgacctccccggtgtgaccccgaaggaagggttcatttttgaatgagagctcggaaagtgcctgattagataacttcaacctctaggattgtccggatatagtatatatcccgaatctccttcttgataagatgtttcatacatatagatatcaagttgacggaggataagcagctccgactccagccgtgcggagggcagagcggggttgataagtatctccaacagtagatctataaattggtggacacccatttatcaaaagtgtaaactacctcattgcttccatctgaaacccacgcaactatgtcacaggaacaatacgagactttcaagcttggggattgggagctgcagagcggagagaagatcgaggatgctcatatcgcatacaagacattcggcgatccgaagtctccagctattgtctatccaacttggttttccggaggtatattcagatacgatcctttctctgccccaacactgctgatactgtctccagctctctccgataacttctggttgatcggagacgacaagctcctaaacccgaacaatttcttcatcatagtgccagccctattcggaaacggccagtcttcctctccatccaaccagccgagccctgggccattcccaaaggtgtcattttacgacaatgtgcgggcgcagtatgagcttgttaccaaacacctgggcatcaagcatttgcgcgccgttcttggctggtctatgggaggtgcccaggcattccagtgggcaacgcagtatcccgacttcatggatcttgtggttcccttttgcacggctgcgaaaacctcgctgcacaatcaggtctttctggaaggtgtcaagagctccttgattgcggtgaagaagagtcgatctgccgggtcgggagagattggccttaatagagagacggcggaagcgcattcttggacagctgaagagaaggatgttggcctcagggcattgggccgtgtgtatgctggatggtatgagattctgtgttgatttttgatttttatcccttatctgacacgttgaaaacaggggatttagccaggctttctatcgaggcaagttgtatgaaaccgtgttgggtttcaagggacttgaagacttcatggtcaacttctgggagaaatgggcttgttctaaaggttctgtttgatcccatcgaaccggttatatcggagaactgacaagtgctctacagaccctgaaaatctgttggttttgttgcagacctggcaaattggtgatgtctcgcagcaagatccatacaatggagactttgaaaaggcgatggcatctatcaacgcaaaagcgctggttttgccgtcaaaaaccgatctctacttcccgtgagttcatctcatatattctcccccttggtaaaagtgaggttaggctgagaattacatcatattaggcctgaggattcggagtacgaggttgcttgtatgaagccaggcattgggacactagatgtcttcccttcgatctggggtcgtgagtataccaatacaattacaagtagagaaggaactgacttgttttacagattgggcaggaggtccaggcgatagtgcgcaggatgttgaatggcttgataacaagctctctcaatttttcgcagagaacgaaggtggtagcgtgaattctctagccgggaagctccagaacacactttaataacaaagacacataatatgacatgttagcgttctgtcaatatggtttagtcatgaatgtgatctcttgaaatcgtaatgttctctcgtcgtcgccagaaaacagtagatatattgaccacgtgacgctgagtaagcgcctgccctggccctgcgaagcgccgatgaaccttgcgcagcgaccaacatccttcttcatttcatttctcttcgtttttctttcttttcttccggtttcgttcagagaattgtatttgttcccattgattgttctttttcattttcctagcagcatctaattccttcctgggctgcttacctcgggaaggctcgtcgaccttctccgctcgcgttatctaatcctccctattttcacacggcttgtgagactaaccttacaatctcgaattcctccccacaatggctacgccacctgtccgacagtggggtgttacacccccgatctcgaccgtcctgccgaccaaggacgagcttgcggcgaacgacgatctcatcgccgagctcaaggctcagaacaacttcgagctcccgactgaaacggaacggaggtgtgttcgcatctcaacaataaccgcaccagagctctggggctgacattgcggaatagaaaacaagtgctccagttactacagcgcgtcacagtggaattcgttcaagtcgtcagtcgcaagaagggtttgtctcctgctgctgttgaggcttctggcggtaaaattttcacgtatggaagttacagactgggtgtatacggaccaggtcagtgttcagctatgtatggatccaaactctcatgcccgtattaacgatggttgcttgcaggctccgatatcgatacactggtcgttggacctaagcatgtcctgattgatgatttcttcgctgaatttccccctattctccaaagaatggcttccgagggagccatcgaaaagatgacccctgtgcccgatgcgtttgttccaattatcaagcttgaattgtgtggaattagtatcgatctgatttttgcccgcctcgtcattcccgctatcccaatgaacctggatttgaagaataatgattacctcagaggactggatgaaagagaggtgcgatcgctaaatggaactcgtgtcacagatgaaatactggagctcgtccctcaacagaagacattccgtcttgcgttgcgtgcaatcaaactctgggcccagcgtaagcaccacttcctctctctgtaccgctattcaaattgtctaattatctttacaggacgagcgatttactcaaacattgtcggattccctggtggtgttgcatgggcgatgctggtggctcgagtttgtcaactatacccgcaagcaactggatctgttattgtggggaagtttttcagaatcatgaacaagtggaattggccccagcccgtcttattgaaacagatcgaggatggacctcttcagatcaaagtctggaacccaaaggtcagcacaaagcaccagtttcgctggcaatgtgggctaataacaacatcagatttatcatggtgatcgattccaccttatgcccatcatcactcctgcttatccctccatgtgcgcaacgcacaatatcagtatgtccaccaaggctgttattctcagagaactacagcgaggtggcgacatggtagacaagatcttcatgaagcagctctcgtggcaggatctattcacgcgccacacattcttcacccacgattacaaatactatctcagcatcaccgcttctagcaagaccaaggaggccgagtcggtgtggtcaggtctcgtggagtccaagctgcgtcacctcgttggcgctttggatcgaaagccaatagttgcagtggcccacccattcccgaagggatttgagagagttcatctcatcaagaacgagcaagagatggaagcagtcaagaatgggtctacacaatatcaggctaaaggcacaaagacggcgatgactgatgagactaaggatgctgctcaccaagccgcagtccagaataccctcgaaaatgcagaggttccaggaccggccgaggtcaaagtcgagggcacagtcgataatgatggcatgactgtctacacgacaacttattacatcggcctggagctgaaacctcttgagccaggtaatctcacccctgtccttgtatgacatttctaacttttttttttcttcaaaggccaatcgcgatctctggatatatcaaccgactcacagatcttcaagtcaacctgcacctcgtggccaggataccaggaagaagtcatggagttggctgtcacccatgttcgcaggtaagttcctctgtctgtgactcgtggatttttctaatgtcctctagctttgatttgcccgacgatgtcttccagcccggtgagacccgggcctctcgaccaaagaagaaagttaccaaacgctcagaaacggccggccaaaaacgcagcattggcgagttggacgtaagtgtatcgaagcgagtgagatcggcctaacctggcaaaccatcaaccttggaactcgtattccgacgccctgcgaaacaaaaccccggatgtcgacaataagaataactaataccaacttcgatttccagggtgcaaccgaaggacctgcgaaacgccaatttacctccgcaactcccgcctaaacaactccctgtatccccttcgcccctccatcccgccggggctggtccccaacaattgatatcagaaccacgaattgcttatggtctctgacctaatattgcagtttgaagttctacccatcaaccgaaccatctaactcctcgcatattcgaatgttacccttctctacagtgaacgtcccgtgctctcggagcataaggttggttcgttcttctcttctcttcgtcttttgtcttttgtcttttgcaacagctagactagacacccttcttctttctcgccctttggtgcctcacctcttactgggcatatttctcatggcgcatatgtgtatgggccggatttattcattatctcgtctatttggttggtgtagtatttcgttgtcggtggaatatgcggctttcctctgcccaggtgggcgtatccattcgccatcgtgcagatagttcaaatagtgaaatgcaaggacgtgtctcacaatatgtgggctacacataatccccaaactgtctacatcccagtaattttgctctcggctatttcccttcccttctggctctaacttgctggtattcaatcccgctactcttatgcgttcatttggcgcttcgctaaagtaattgagtgatattaccgttgatacagctaccattgaccactgctttatcttcccattggccattaggccatcttctaccggtatctggtaaagccatgctatatatggacgctcacagagtgcaagatatacagaatcttaatggaacatcttcgaagtcattccaagggagataaatgcattatagctttacgacaagaaaggtgtcattcgggaataataagtacaatggggagaaagaaaggagaacccatctacaacgagtgcatggttctgtgtggtgaaggaggaacttcctggaaggtgcggccaggaaagtacgaacagggcaggtgtgggcatgttcctcaattctcgccgcagcaagataaaagcaagacaaagcatggcatcgatttttgtgtgcctagagcatagatttcattttttgcccttttcaggcttgtcggctgagggtcgagtgcctgattttcttgtcgtacgcgtcttggttgcaggtcagtgtcaccgagcaaaaccaacactcggtctttgcatgctgttgctttcccacgtccaactcgtaggacacctatagcggggtttgctttaggtattgctgtggacattatcgccgacgttaagtcgcataggtcgaatgtagacgcgcaatgtattgtaccgcaatgccagggacacgatccagagagacatttcgcgtcggctgggtattttgcggcgtttggaggtgacatttaagctctgtcggctgcactccgacccttacaggtgtccattcttcgatgtcgcttatccgaattgctggctcgttttattccatctcggtatctgacggcagtgcgtacaaagctctcattccgaacctctctcccgtacttgctcatgttcattggggcttccatacttgaacatatccggagtgttaggcattttcgcaacgcatctatcccaggcaggagaaagactacacatgatgttcatagtctccatggataaacgtcacatgcggaagaaataaaaatgtgccacttttcattatgatcgtgacgagtcttttctcttgtggtagaaccagacccagacattcaagttttggcaagtcaccacgcaagttcatgttgggagggaaagtaggtattcaccaaattgtttgaacgccacaaagagaagtatgcccgagggtcacacacgacggcgccatacgggggccgactcctcgagccctgcgaacacaagacgagggacacagaggctttgaaacaggtgtttccaatagtcctccgactcgcgttgattgctcttgttccatctccaccatgctagagacaatttccccttcttccatcagcagtaagtgagtgttctggacatcaacagcatgacgcatcccacgactcccatatgtgatatagcgcttgatttatctcttgattttcctggcagacgtctccagtcgtcttcgccagtcagtttgaggcgaatagtccactccaccagaagctctcgtgttagagtcggtaaatatagccaatcgtctctcgggattgaaatgggtaattgtatttctattaatcgtccgaattcccttcttgacctcaatgattgcgaagattcttaccgtatcttggaccgcaaagctccgtccgcaagggtactttatgcttgtgaacttgcatataaagtgaatacggttgagtatccaattcaactttgggcgagtgaattgacagtgtttggagagaaggctttccgagtcatcgaagatatgctgtgttgtacttccgggacaatcgatgtatcactccgttaaaccccgtggagagggtgtaaaagagacgaatattttgagatggggattaaataggaagagggaagaacagaaaagagagagaacaggaaaacaaacgtgacctcaaaaatgcttcggtacgtaccttcccaatttggtctatacagtatacagtatatctgagaagagaaggaggagggaagaacagctgtgatattctcttcaataaatagcctatgggatcctagccaacaaagcaagacatcatcctcaaaattatttgctcaaactttcatatcctaagccctcttatagccatgatcgggctcactaggtagaagtttgatgtcgaagctgtggtgagaggtacagacgctactattttctcgattttctttagtcactgatgattctagattatattctacaatctctgaataaacttgaaggcattgctgtcccgatatcggcggcagacggtttaaaaatttgggaagccactgcgcgaatttatgaggagatgctgatggtaatcaaagtgagtgaagttgaggacattggggaattcgtaagagctcagatatgtttgaagaggacatttcaaggcctctctagttggatgaggaaaaaaaaagagatgctcacatgccgatttgaacgacagacctcgtgatggactagaaaagtactagtcacgcgctctaccaactgagctatgcgagctggttatgtgagcagggcggcggagggagaataacttcacacagtgttcaacttatcatctacattattacttctcgaggtcatatgataattattttggaaaaaggtgacaccagttaggtgatttccacctatatagtatgggactcatagtgattgagaaggtgattcctgtttgaaaggctatataatgaactgcgcgtaatatgaagcgtgggtggtgttagcgaaaatgcggatagtactgtagagggtggaaagtctaaggcggttgtgaaatggctgaaattgacgaactgttcttgtaagcatgcttgcccaggccacgagtgcgagaaaagctggacacttaaaggcaaagtttagagagatgttagcttaaaacgagtcatgacgctgagctaagtattgagcttggaagacgaaggtacgtgcaagtatggaatgttcaccgccttggcattaaccccttgttatagattgatctatggatctggaagccttcgtaccgccttttgatacgagtatactatatctttatcaagaaaggatatattataaacatcggataaactaatatctaaccagctcgcatagctcagttggtagagcgcgtgactagtacttttctagtccatcacgaggtctgtcgttcaaatcggcatgtgagcattttttgccttctccagctataaattttttacaatctgtaacggtgtctttttttttgctctctcccttcatttagccaatcttgataaccgcgaagtaaaacaagcgccaattggactgtgcacgggttagtaaattcatggctgctaccttttgagtaccgcgaggtctggaaaatgggaccttaacgtgcattgatgaatgtgtgtatatatgaggttattttagggttatgtctacgaaattttcatgcatgaggatgatttcgctcctccggactaaataaatccaattggccatctgatattgttcgaattgatctgatgcctaagagaatggactctgaaatcggcacgaaaaatgccgatgtagaatttttgagtgggtcctgccctaaaaaaatccgccgccccatatatcacagccagaccaaataaccatctaggccggctggcccaatggcaaggcgcttgactacgaatcattagatattagtttatccgatgtttataatatatcctttcttgataaagatatagtatactcgtatcaaaaggcggtacgaaggcttccagatccatagatcaatctataacaaggggttaatgccaaggcggtgaacattccatacttgcacgtaccttcgtcttccaagctcaatacttagctcagcgtcatgactcgttttaagctaacatctctctaaactttgcctttaagtgtccagcttttctcgcactcgtggcctgggcaagcatgcttacaagaacagttcgtcaatttcagccatttcacaaccgccttagactttccaccctctacagtactatccgcattttcgctaacaccacccacgcttcatattacgcgcagttcattatatagcctttcaaacaggaatcaccttctcaatcactatgagtcccatactatataggtggaaatcacctaactggtgtcacctttttccaaaataattatcatatgacctcgagaagtaataatgtagatgataagttgaacactgtgtgaagttattctccctccgccgccctgctcacataaccagctcgcatagctcagttggtagagcgcgtgactagtacttttctagtccatcacgaggtctgtcgttcaaatcggcatgtgagcattttttgccttctccagctataaattttttacaatctgtaacggtgtctttttttttgctctctcccttcatttagccaatcttgataaccgcgaagtaaaacaagcgccaattggactgtgcacgggttagtaaattcatggctgctaccttttgattannnnnnnnnnnnnnnnnnnnnnnnnnnnnnnnnnnnnnnnnnnnnnnnnnnnnnnnnnnnnnnnnnnnnnnnnnnnnnnnnnnnnnnnnnnnnnnnnnnnnnnnnnnnnnnnnnnnnnnnnnnnnnnnnnnnnnnnnnnnnnnnnnnnnnnnnnnnnnnnnnnnnnnnnnnnnnnnnnnnnnnnnnnnnnnnnnnnnnnnnnnnnnnnnnnnnnnnnnnnnnnnnnnnnnnnnnnnnnnnnnnnnnnnnnnnnnnnnnnnnnnnnnnnnnnnnnnnnnnnnnnnnnnnnnnnnnnnnnnnnnnnnnnnnnnnnnnnnnnnnnnnnnnnnnnnnnnnnnnnnnnnnnnnnnnnnnnnnnnnnnnnnnnnnnnnnnnnnnnnnnnnnnnnnnnnnnnnnnnnnnnnnnnnnnnnnnnnnnnnnnnnnnnnnnnnnnnnnnnnnnnnnnnnnnnnnnnnnnnnnnnnnnnnnnnnnnnnnnnnnnnnnnnnnnnnnnnnnnnnnnnnnnnnnnnnnnnnnnnnnnnnnnnnnnnnnnnnnnnnnnnnnnnnnnnnnnnnnnnggccggctggcccaatggcaaggcgcttgactacgaatcaagagattgcaggttcgatccctgcgtcggtcaatatttttgtcgttctgacgttctttttgctccattgttgtccagaatgtggccaaaaatggctgttgcactacatcgtacgatggtgtgtcgccgtatggttgagtggctcttagttttcagagtccacgggttgattgttgagttaccaagggagagtaagagtagaatttgaatattagaatttgatatatatttcagtatgtttacttcagatatgtgatatactaaattaaacgtaaatttgatactgcactacccggagcatgcaggttgatagtatgcttccctatagtagaacgtctagaaaacagtaaatcaaccacatggttagaatatcagactaaacatatgtcctgtcggtatacaaatgtctcatattggagccgagtggacatggcatgctaattttagcgttcgtttttagatgttggctaacgcataaccttgatttcattgtcctccaagttgttttaatgtttgtgataagtaaggcacgaaccgccttttatataccaggtgttaagcgggaccaaaccggcggtctttgtccaaagaaggtatgacttttattttaaaagtaaataataatggtcgcccgtcattgacatatttattggtaatagcagagctggtaagacatgatttcccactgatcagatttcacttgattgtttctcagtttgatctcactttcaagcaagcgatgtctcagtgattgatagaggcaggcttgctcatttataaatctataggagataatcgttagccaaggccactagcaatgagtgagagttccggatatcaacagcatgacgtataccattagagttcaaaaaccacctttgtatatactctcggagagcaattcttgattgagacatcccaacttcgactataagtgatggccacttactaacaagcgtagagtgagaatggacttcggaatcatactgatatccggttgctttgcgcagttgaacccggccacctctctagcactagtcgcccaccagcgccctgattgattcggtaaaccagcggcagacattgcatccccgaatgagtagtagagctggcaaacaacgcattcgtgctgcccgctaggcatgattattagtagtatgtttcgatcgtcaaagtaaatcgcactccactaatcctttcgcgaagaaggtgtttgcgtggggaaccgcccacgtcagctacggcttcagaggtaaaaggtattgagtttgatttgtttcttttggtccctctaagcattgattgtttgaggcttcttttgtcgaacgttcagtatcatcaggaatatgaaagtccgcttctgtaggttgaagctcgatgggggaatcgtgttcaattgtgatattagatgagttaaggcaaggcaagatgtagattcgaggagcagaggtgtttgcgttgctatctccgcctcaggggtacttttatggctatccatcacatggccgcttagttccatggatgtagtcttttatcttaaaggtatagagatagctcatatcgaaggttccctactaaagatattcggggatagtttgaaagccttagaaaagaccgatagaaagatgataatgaaatggttttataatagtgctagactttctctacagatgtacgaccgatctagatattatagtacaggacaaataaccgagggaaaaagttgaggctaggcctccacttatccaagcatatcagctttcaggacatctctcggcgtaaatattgtccagaaatgagacttttgccttttctcgttgtgctgaaacaatatccggactttttccgaattcatagggcactctgacctgacaacgaaatggcaggactaaatatttagctctattatgcatactggctatatgtagagattgatatagataaaaagtggatctggacaggacccctcgcgctccaccatctaactttgcaaaagaacaaacagaagattgtgcatctaataatctaggcaagtaaatctaaatgtaataagaaaatatataaaggaatgcaggtcaaaaacggctggtgcccacgcccttgaatcgacaagcccccacctttcagcaaaggataatcggtatctagaaatctcgggagcgcgttccgacctcgaggaactgctctataaaaccactgccggtccgcgtggaccagggagataaacttcctttaaacaaccatctaagtcccaaaagcttccccagctctaacacccacacccacaacatggaaattccacagcccctcgaggccccaggcccaatcagaccaataacctgcgtcgaaatgcacacagcaggcgagccaacgcgaatcatctgggatggaaccccgcctttgacaggtaccctgctggaacaacgagcgcaagcaaaagcccaattcgacgaattccgccgcgttctcatactcgagccgcgcggccactacgacatgtacggtgcgatcctacgcccggagaccgagctcgtcgcgtccggagaagcccatataggcgttctgttcatgcacaacgaagggttctcgactatgtgcggacatgcgacgatcgcgctgggccggttccttgtcgacgttgacgagaaggtatttcctcgtcggagggaattgaaatttgaccctgtgtcccggacgacgacgcttaatcttcatgtgccatgtggcgtggtcgaggttactgttcccacgttggattctgggaaatcggatgcgtcgcggcctgtttcgttcgtgtctgtgccgtcgtttgctactgctatttcctttcaggtccctgtgcctgagaagtatcgctgggctgagcttgctggcagggcttctgttacggcggactttgcttatgggggtgcgtactatggtatgattagtgctgaggaattgggcttccctggtggacttggggagattaagttgcaggatatggaccatgcgacaaagttgctcaaagaggctgtggttacgaatccagacttgcgatatctcatccaggatgttcggactgctgaggagggattcttgtacgggattatgatcactgatacgcgactgggacatgttagtgcttcagaggggacggcggctgctcgtgcgcagttagatgctagcagtgaggagacagggctctgtttctttgcgaaccagcagattgaccggtcacccactggaagctgtgtggctgcgagggtggctctcgcacatgccaaagggactttgccggcgggtgagaagaggatttataattccctggtgactcgtgcatacagaggtattcctggatttgttgggtctgtctttgatgatgctggcacaagtggaggagaccaacagagtgttcgagtctgtgtcgagggatatgcgtattataccggatatcattcctttgtggtagagaaggaggatggcctcggggtggatggattctctgtgagggacattgcactatagtggctatttgaagcagcgaattcaatatttgggtctgtgtttgtcttatttgaacttaaatagcggtgctttttgccgcctttgcccaccaaatagaataccatatataaagttagaaattcaagtttcattcttgatagtcaaatacttcatgcctaaactctctattgatctatttcatatagctaaggctctgggttgaaacataaccctaaaattgcggtctcgggatctccatggcttccgtggttcgaccatacgagataccacctagacgactgataggcttaagaaccttcaaatcgacaagattcctttcctcgttaatagcgtcatcccgaacccaaaaacgaacgccctcaatgatagcaagcacacccgatttcttaccgggggtgacccgactctcaaactccttcaactcaacaagcttgccctcgatagaaagaatggactccttgacacgagcaggctttacaacagaggtaggcgcctggtgcagccccgaaatctcccactcggagacaccataaggggcattgatagaagtcgagttggccgcttcaaggaaatgctcggagatgatattgataacacactccccagtctcattcaagttcctcaatgagtccttggctttctccatggacccagaaaagccaactgtgaacagcggcgggtcgtggttgatgacctgcgcgtagctgaatggggcgagattggtagtcttgccatctgcagactgcgtactgacgagtgcgatcggtcgcgggaccattcctgagatcaggaacttatagttggaggccacgggacggccctcttcattggggtcgatctcgacgtggtccttcttcagactcgcgccgtcgtcgttcgcgccatcgccttgcttccatgtggggtttggagacttggtgtatgtgatctcggcatcgcggcgaaaatctggccgcgaggcttgggttttctcgaaatcggggccgactttgagcattgtgcaggtgtggctgaagaattgagcggggtgattgggttgaaatggtgcgcggggtgttgcgagatcagcacttgagattataaatcagccatgcggttcagtatgggttgccccgcgaagtgttgacgatgagggtcacctccgtcatgctcgctagaaagtgagggcagtcaaatacttactacaattgcaagaatgagagcctccgagtatttcgggaggcagatttaagtagaaacatggggaatatggggcagctctttgattccaagaaattcttatcgcatttactatcaagcttcggctgcagcttagtgccacggatggggctgccgcggacttgtattgccacgcactatatcacttcctctaccgactatcgggccgactccggggatatcgccggggaacctttgcccctggagaaaaaccgagtcacgtcatgtgtacaaggtctgtttcaggattatgggtgaccgtaaagttgtgtattattacatgtatacaggacattcgaaaatttgcaagtattaatggcataaatcagcaaatgaatccatagtattggtattactgacctaaacccacaactgcgggattttgtttctttgatcctgaactgtccacaggaaatggccggctaaaagcaccgttcacctgaccttctagaaactgatgtggagcctgtcggtaaatactatattcttcggtctgttggggagatttccctgtttgagatctggaataagcttaaatctacttaaataaccttggaatgaacgatcaaccgtttcagataccgagtacctatacggagaatatatacacgtagtgttgctaaaagggtctatacttggaaacgtgggggagtgaaatacgggtccccagtccccaacccacttctccccataaaagctccatctgccccaaagcctggatcctcggagttgatgcgatgaatttcaatgttttgatcctattttagtcattcaagttcatgagcgtcaggcatattatattccgtcttcgctttattctttaaagatggtatttctaccccaaaaagtaaagtgattacagtataggtatataaaacacaagggatcgcctcgtcccatgaccgattgctcccgaacggggatggcgtggctatttccggcatagcggtcaaaggggggaaactgactccgatgttttcgaatcagaacattaccttacacaaatacatcgtgagatttccaaaagtttcggaaatgtaaactgtgctagaaagagtggcgtagtacaagcgaaggaaatcacgaggccttatcaactcccctcttccccaacttttctcccttgaacacttcacacatactttttgctcccctattagcctggaacattggccaccgttgatttcctcctaatgaagctttcgccatttgacaccttccctacttcatccgtccgatcctcgtcctccctgaaccttaggatccaagatccgcgccgagaatcccccgacgcgctcaagctgaagctgggagtgtgcaggtacccaatgggtcgaggccacggataattattggctcgccatgagcctcccttctcccaagaagaagaacggcggcattccttctgttcccagacaaatccgctttgttgccacagatgggcagccccaaaccaagcggcgccgcgttaatgccgcgtaagtgggcctcatatagttcacggacataacttcgaggaccaagacactgacgtcacttttgttttattcagttgcttaacatgtcgtcggcgcaagattcgatgttcaggtgaacaaccaggtaggatggacggggcgtctcgattgtggatatcttgctgacgggtatatgagggaagtatgtaagacttgctccgactacaagcatacctgcctcggatataccgagtcgaccgcacaccggcgaacgcagtccgactccgcatctcgagcgccgcccatttccgcaccgaatgaattgagccaacccgctgcccgggcagtcgaaagtagctcccccgaaccagtgtcaacaacgatagccaagccctctgcggataagccgaatgcgaaaccgcccggatcaaaggaagtttattcctgggatacttctgcgaacaaggacttggatacacaggctgttggggacagtccggcgagtggtcgtacctctgtgagctcggggggtcgtacacacgtcccgtattttcgatacttcggccctactgcgattgtaccggggtttaaacaaatggttgtgcaagtccgaggttctcgcaagagtaacccgtccacgtcctcagaatctctctctcctctcaggagccctaaactgtccgatattcacacaaaacccctggctactgccgcggataatcgggacagtcgcgatgcgaatatcccattttatgaccgagatgatgcacttccggtttcgaatattgtatcccatttgtgcgagctgttctttgcccacctcggttgcagctttcctttcctacagcgagagagatttctccaggacctcaaggagaagaaggtcgacaccatgttggtagatgcagtgtgctcgttagctgctagattctcaatacacccatcacttgatcctccacaggctcctcctatcgatcgttcgcagccgccactcgacgataaaaagtgggaccgtggcctgccatttggtcatcgcgcgatgagcggtctcgtggattcactgccatgtccaaccctttctgccgtccaagcctgcttattactcgcttatgaacaattcggatcaaatcacgacagtggactgtggatgtaccttggaatatccattcgcatggcacaggaccttggactgcagaagttgcaaggcctcaaacataattatggcaagaccggcgtcacaccgagtgaagtgatgacaggtcacgcggggaaactaagagaggaacagtatgatgatctggatgtgcatctgacacccaagactacctcacagactttggttgaggaacgtgcccgggagcgcgaacgggtagactcgttctggagcatctttttcctagacagagtcatctcttcgggtactgggaggccagtgacactgcgcgatgaggatattgaactctgtttccctcttcaatctgaatctcagctaccaaatgggtggcccgcgcctttcccaccacttattcggatcattcatctgtacggccgggtgaccgacctcattaatggcattcaggatgtcaacctcgtcacacctgatacgttgaagatgctggctgggatggaaagcgacctgaccggcatctatcaacacttgtcccccagacttcatttcaacgcagccaatttccaggcctatgtcaaagccaaggagggaactaatttcattcttctccatttttggttccatactctcatagttctccttcaccaaccgacgttgttgaactcatttggtggatcaatccaacatctctacccgaatagtcgtgagttgtcgatgtcatctgccaaaaccattgccgatatcttatccttctcggaacttgtcgatgggaaaagcttcattggcaatcctttcacgagtcagccgatgtacattgcggcgtgcgcattcctcatggaaagtgcttactatgcgtcctcatcctcgggagctgagtcgcaacaacctcagccactgttggcgaatcaatccagtgggttcgtgatgcccgctatagagtcatcgaacgggacagaacgaaagtctatggcgaagcatatcttgcttgcttctgccgccaaagagaactatcagcggtgttataaggccttgaaagcactcaatacatattgggaaggcactgggtatattttgacagtgctggatcagaaggccaaggggattgtcgaccctctcctttacgccgtggaggagatggaaattacccaaggtatcgcccctgggcaaccgcctgggccaggagcttggtgtgcgggcaatgcaccgacggattctgtctttgatccagaaagaccagccggggtcgcggatatctcatctgatgggaaatggtcaccacacattgacccaagtcaaggtttgtgagattcgttgatatttatgataaatatagcactaacaacttatatcttgacagctatcggatgggcactcacaggagcaacaaattcttcacagcccaacttgagtctactctatcagatgtccacgaccgaggccgagtcttcgcccaatagaccaacatactcgtcgcagtacagtcacagctacccagtcctaccgacgaatgccggcgaggggccaagctcttcatatgcgcaatctattgcacccgccaggactcacgaagaaatgacaccctcactcaagacaaatgctaaataccccaatgttcacgccagaacaactagcaccgacgcctcttattacatgggcatgaattcgacctatcccgaatcaaacatgcggacaacacgccccgtacagacaacacaatctacttttcccgggatgctcccccccgggctaccaacttcacatatggatacccaaccctccgcatataattactcgataccccaagcaacatccgatctccagccgggaatggacgatgccaacgggatgatgatcgggagtcatgaggtcgatatgaactccattaaccagcaagactctttgccgttcgttaacggcgagatccttccgtggttggaatacctccctcaagatgtcctcagtttcttcggcgaccatcaaaattatccgctcatgagtcctgacgatgtgtcacgacctccgtaatgttcttttcgtatatatttatctgcttgaggcgatttgcattcgcctttgttccagcgattagcttctgcttttgtttatatatttccgaccgagatgggggttttttggcgtcatgttggatgatatccttgccagcaatagatccctcttttggttgtgtatgttcaaaccggcatgtttgacttggaggagttgggttcaagtccatttccaatagactaaaaaaagtttctttgcaaattgatttctttgagatcctaacagacggtataaacccacgataaccttggaagttccacgttcaatacaacttacgatgtacgagtatattgtgtggcttgacgatcgacatgtcagtggttgcccggaacaacggggcggtgagcgactgtcaacatacgttggagtgtcttgaatttcgcgttcacacaaaggggaatatgtggaatttggttttaccaagtccctagattcttttgttatcacagacagcgctcgaaagtctcagaacgcatcctcccgccagccattacatgagaatctcatggcgcagttgaatgacgacagtcaacaaaacatcaattgcacagagatcctgagcccacaaccattcactcctccaagcaaaggcttccttatatcctccctcgagtccgagccctcccttgccgataatgcccagatgtcctcaacccaagaccatgaatacagctcctcctcgtcccgtcattcaacaagcgacgtcttcggccacgaaatggacgatgagctagaccaactgaaatccagagcctcgagtcgctcatcactagcttcgaccccagcctccgtcctcatccacccagtcgacagaacgaataaaatgccagagatggacatcaacgaaaagatagccggctacagaatggaggagtccgagttcggcgacttcaatgacagccccgctaacaaccgcaccatccgccagcgcgaagccgccttccgaaaaccgagttccgtccgggcgatgcaaatgcacacagaagatgaagccgatgacgatgattatataacgcccccgcgacgacgacaaggcctccggtcacggtcgcccggcccctccccattgagacgatcaccgtattactcgcccaatgcaccgaaacagccgaagcccaagagggaggctcccctcgtgctgctacactgcaccttgctcccgccgtccatcccagtacctggggcatcggacccgaggaaccaggatatcctcgaagaagagctaccggcgcaatactggaggcgctggcggcggctgcaagaccgggtgggatcgagcgtgctgcgcgatcgtggcgtgctgatctcgcacccggaggacctgtacgatatcctagaggagcggctgttggagagcctcgagctgaaacggccacgtcttcagaacgggcacttcgtgggacaggacgacaatgactctagctctggctccgatggggaattctcggatatcggagagagcgagacggacggcgagcagggggatgagtgtcccgactgtgggaagcatgtgcggcatggagatagtaatcgtaaatgggagattcaggtatttgccgcgaatggattgatgcgcgctggggcatgggctgctgcgtggcgcgatatggagaaggttgatgtcgaggtagggctttggttgccctctgatattcgcgataatttggagaggaggcttgcagagaagcagatggcagctgtggagcaggcgaatagtcagataccgcagatgtcgccgtcggttgatggtagacagcaggtcccaccggagtttttgcagtcgcctaggcatggccatgcccgcatggtcagtgatacggggtctttcacgacgtctgatgatatgactttcaggcaggctttcccggaagctggagctcgtctcgaccaaacgcctgaacttgggctggagaagaaggaacatgaacctgctctttcgaccctcctcatcaattacatccgtgttctggcggccgataagcgcaaccttgccctgcttgttctcagtgtccttgtggtttttcttgctatcggttcccgccagcaacaagtccacgtctactcccatttttcacaaggctcggctcatgagatcctgccctcctcggctgtgccgaatttgagcgcggctccatctcttattccttctgtttttataccgaattccgacttttcgacgtctgatatagtggagtctgcttctctgactgttgactctcttgatcctcatgcgcaggctccacttgaggaggatgaaaattcttcttctttgtctgatgtccccgttgagttttctgtgccgttcgagctcatggagcctacccggactacgcaacttccccttgggggcaacccagagactcctttggatgacactgtggactctactgctatgcctctagagtcctctccttcttccactgactctatcgagtctcccgttttgttagatgagactgcccagtctgataatcatggcgaagaagaagagctcgaaaaagacgaaaaaacagattgatccactttctcaaccttacgaccacgacaggaacgatatcaggcgatatgtttggcattttgatgatttttacaatgttcctctccattttgatgtcttttgctgatttagccatagccatagcccctcgttagttcagctttatgattctccttatattagcgaacctcatctggtttttcagatttataaattgtatgttcactcaatgatatcggccgtaaacgcttttttcaaatgatatgatccagttggatcgatagtagtagaagtctttctttggatatttttttctggatatcttttcctgggatgacataaaatgccttaaatctttttatgaaacaatgccaagtctagactttgatatctccactttgcccccaggtcctcccgctcgcttagtgatcgtccctctccaatagattagctatttgacagatattggatatcagatctgtggattatgcatagaacgtgtggagacaatgcacgaaaccttcaaactggttcttccatgtaacctgtgtccacatcttattctaaaggcgacctgtcctcacgatgcggggcaatctctacttgttacatcccacaatgtacaccagaaagcagaaagcagaaagcaaaatggaaaactgattcaaggctcgatattattgattatcgattaaaggtaaggttagttgaacgagttcgattttgtattgggcaggttcaagtgtcactggcccagcgaatttatccgtcaacccagcataagtcacaaccttcgtaaaaaagtgctaatcacgtccagaccttcgtaagcttcgtgacaggaacatctagtagccgccgccgtaaccaccttggccgccttgctggccaccgtagccgccctgaccaccaccgtaaccgccctgaccaccgccgtagccaccctggccaccaccgtagcctccgttgccgccaccacggtaaccgccgccgccgaagccgccgccgcgaccaccaccgccaccggcagcgcgctcagtagccttgtcaacacggatctggcgaccgtcgaacctgaaagaagtggttgttagtagatgttctgacgggaagtagatgtcgcgctggaacaggcgacgcccatgatgcgcgactgtcccaggacgacttgacttgaccagtcgcttaaagcggaggagaggagatatgggattagcttgcttactcctggttgttcatggcgttcatagcggcagtagcctcatcgtcggtggagtaacgaacgaaaccgaaaccacggctgcgaccagtatcacggtccttgacgacggtctagaaagaaaatggacattagagttgggcaatcagtgatggaagtcagagcgactcacagcatcctcaacaacgccgaattcctcgaagcgctggcgcagactgttgtcgtctgtgttccaggaaagaccgctagaaaatgagggtcagcaggcgcatgttatatcttcactagggtcagtcttacccaatgaaaagcttcgacattttgatggaaatggggtggagagagatcgagagagagggggaaagggtgttagtgtgaagaggggcacagccgagcctgatcttaaatacaacccgggacggaacaacatcaccccacagattcctgattcctggtttttcaggcgcgttttttattttgttttgttttgttttgattttgcgatttggcggtttgacgtgcgtttggcttggattatggcgtctgtgagacctgacttatgtatacttgtttgggtaatctgtttacctgtattgtcgctttgtcatacatagtggacccgtctccccacgctgtcaggagtctagattcctacactacttgcacctcatccaacagacgtatgcaacaatggcaccatttgaaataatatccagtgtggatgttgtagaacaagtgaccaagagcaaaagtaccgtatcgaaaactatatttagaatcctccttcctatgtgttctcgttatgaggtcataccatcccatctagatcaccccacccccggacgttctatataaaatcttctttctcctccacccaaccttgattctacaaccaacttacaactcatactctcaactcctcatctcaactcaatcatcaatatgcctgtcattgaaatcaccaggtaagtctctcccttacacaaacaaacacaaacacaaactaataccctacagcagagccgagttcctacaaaagatcctcggctcaccagaccccgtcgtcctcgactgctacgccgaatggtgctcacactgcaaagccatcgaaccgaaaattgaagaattgagcaacctctacaccccagtgaaattctaccaggtggatgtcgacaaaatcgaggatgttggccaggagctaggtgtgcgggctaagccgacattcatgctatttaaggacggagagaagattacagagattgttggggctcatttgcctgctgttgagcagggcattaaaactcatctcctttgagggcggttctttttttttatccaccgaggtgcttgtgcttgtgggatacatgcctccagtcatctgctaagctggtcttgttataatgttggcatgtcatcgatcagacagctgcttatccgatcatgttttaatggatacggctcttttatcaaagagggattctcaactatgttttattctagagtgcattcatacagatattgctcgaacattcggcatcccattatcccgtgtacaaccactcaatacactgtgcaacctacagcaaataccaaagtaaacatcacaccaaggcgtcagaaagcccacctatatacttccccaaatctatcccatatacctcatctagacactagaacccagcagcaatagaataattcgcagggataacaggccaagcatcaaccccatccaacatcgccaagaccatccccccactctgatgaacctgaatatgacaatgcaacaagaaagccccgggattaacaacatgatacctgatcgccgtccaactcaagcccgtgacagccggaagcgtatgaaaagtatcccgatactggggcgtctgcaaattaaagttaccaggaacagcctgtaccgcttccgcgaccgagccccaactaaaagtaccattcccctgaccgataatgaaatgcttattcgaatgcttgtggatcggatgcgggggctggaggatggtatccgtctgaagaatcaagtcgatccaggtattattcttcgttcggacgatcaagtcgccgggaatagagttctggttgaagagcaatggctgtgcttcctcgagctcgaggccgtagctggaattaccgagtctccagcggtaggcgacgccgacttggttgatgtgcaggaagaaggtttgtgcgatattgtttgacgggacgagcgctgggaacgggacgacgatggactcgttaaggaagacggtgtctgtcctggcggctgcgttgttgatttggatccacgggttggatggccgggttagctgcgacacgccttggtatcgcattattgccgtcgtgttcaggaactggtttatgctggcgctgaccatgcgcacggcgtagtctccggctggctgggtgagggggatcagaaccgagtatcggtttgagtttggaacggtgactgcgttgactttgagaggctcgatgtatcgtccgtctatggcgtatacccacatgtcgtgttcgtcgactgagaaggtgagctctagcaggccggctgtgctaatgagatcccagctcacgtattggttggctgcgttgacagtaaataattcttggggaccttgtgacggtacgcagccttcgaacatggttggggggatggcagcgtagttgtgtgggaagttgaacaccgtttcagtgatattaggagggaagcatctagtgatatagttagtctttgccgggatcatcaaagtactcattagacaaccactcacgccatatctgttagtttaagaccatcacccaaggacgttttctggacaggtgtcgtcagggcatcaatctcagcacgtggcagacaagtgatggaccctttgccattgatgagtaaagcattggcacagaatgcgtctgtgccagacgcaatctcagcagcccatatctcctccgacgtgaggacacgccattcagaaagcaaaacgggagaggtcacgatctccgcacggatcatagccctcagctgagcgggatcggttgtgataagactgaagggcttttgcaccgaggctgcaggggtgatatagatcggtccgtaaaggccgtcttcgagagagccgcggtgatgggcatgataccagtaggctccgtactcggttgcagtccatttatacaggaatgaggtgttcggtgtgatggatctctgagagacacccgggactccatcagaccaaggagttcccagctgttcaattcctatagaattcattagtatggatatgcaaatcagctcaagccatcgaagagcttaccatggaagtgtatagttgtattgaacgggcaccggttatcaacgaggaactcaacattgtccccctggttgatccgcagcgggggaccaggaaactgcccgtttgtcaaaatcacttgcctagacactcctgcgacagttctgttagaccatgtcaaggtaactggaaagaaaactgtagccgcatgtgtccattggacgaggcacagagcccaaagggacaggctgaacttcatatctaaagataacactagactgaaaatcactatcagatcgaacctgctcttgatgtcccatgctttttatgggattcccacccttttatgccggcccagggagagtcatggagcattgagtgagcatatgcatctcgcagctcttatgtgggtctatcacatcagatgcaggattctcatgggcgagtcttcttgcgagctcgtataggcgcaaataaatggaataagccatctacttctgtcgggaactaatctaacttctcggggaataggcgggggcgaagttcatccgagaattagtagattgatcttgggtcttgaagcctgtttcgcagctaagccaatgactaaaggctaaattaggtcgcaatcttcgatctgaagcaagggacgcgattgggaacagcaggctgactcctggcgaatgaaggactcaaagttcaagataccccggtagtcccaaacaatagcttggcggtgctgcagggatgaatctgtaatgaaggtgttggcactgcttgtgtgtaagcatagccctaagcgggcagattcaagacaggaatcctttgggatttggcacgttgctgatgtggtgtatccgggatgaatggcgcatgctgggcacaaagtttccacagccgtgggagagtctgacttggggtcagagttccggtaacctacatgttacacggatgagaatgaatatcactagtctgatcaaagaactgccggtctcggtcgtcatcgtactatgattcaaccagtcataaatcagctttcatcgaaaaagagtcggtgtaatcctcatcccgacttaggagccacgtgctgaaactgaatcaaggtacgcaattttcaggatgaaacgaaagccttaggtgagggaggttatagaaggaagatgggggcagttggattccaaactgaaccacccgccacaaaggtgacgtgtggaagctgcctggatgcagctgagatctaaaacaggagaaggaaatggaaaacgccaattgatttgtgatattcgaaaacatgattaatatccaagtcatatgctatcaacaaggaagattgtaacaattttgtgaagttaacttttcttgccatgtatgatacggcatgggggaagtaaatagccgccaaagacattaatagttgccatcgacaaagtagcctggcatgtcatcatgggtgtcattcgatgcaggagggtggcccgctttggaattgaaaatagcaaccgggtttgaagcagacaactcactcccacgagacggggagatgggctgaccaagtgagcctttcgttgaccatccttgttcttcggaaattttttgaccatcggcgccatctagatgcaagccttccaaaccatcaggattgatttcactgtagctgtcgttcagtcgttgtaggaattctgggtcaaatcccatttgtaccaaagggtcagctgtgctttctcccagcacagacgcagtggttggaagactactagcccaatccgtggagaaggatggatcaggaccagctgacatcatccctgcactaccagcgtaactgcctgatatactccccggtcggctgggcccagcagaagaaaagccagtgccaggaaagccgtggctgcgaagactagggctagagactgccgggctgtggatggcggccccttggcatactgttcgcgctagcatattgatctcccggggtggagctcggaggccgccattgatagcgaatggaggctgcatgcctagatcggcaaattggatgctgtcgttgttcacaggagtctccaatccacagtcacgctttaggacacccagccaaacaatattatctgcgcaggtctggttccagggatcgtcacatccatagatgacgcgacgagcttccgcttgtatcatctgatctgacggaacatgaccttgtgccttttggtcatttatgtatgcagtgagtgcgcgagaaagccgatggtaacaattgatatccgtaggaacgggaagcataagtgtgctaccatcccctttagcatgctcagtgccccagggatcaggagaccgccattcgtagtcaatcatgtacggcggaatggcgttttcgacgcgagcttggatctgtgggtcaaagccccagtccccttgccattgagccatgctagctccatgtttgaaatgaccggccaaatggtctactcgatctttccatgtgtggaagagggaaccacagaatccacagcgggagttgatatctgtaatgctgctttgccatttctccatgcagggttggaacttggcattgtgcatcaagcggaggtgttggttgagatgatccttgcggtaaaatgtcctctcttgcactgtcttctcttggcaggtgacgaaactgtgagtttcaaggtgttcatcgtctggattagctgccaagcaaaagacacaaacaggtataccgtcctgttcaattgcaccgccgtgaggggagcatgtccatttgtccaagataagatgtatggacttctcgtgccgctgccagtcatacttagcagggaaggagtcggtacaaaaggtacactggaaaggacgagcagctttggcctttgaatgggccagagtattgacaggcaccgaggccttgcggcggcggcgacggtctttccggtccattgacccaaaggaaagagaagatcgatgggagaatgcagaagcaaaagagagatcagaaatggatgaatcaaaactactggcggaggcagcgcacagtttatgttcagagctagcatggcttgactcattgttactagaacgggccctcacgtgactcgatggagcctggcgtggacgggagggatcgaatgggggattggccagggcacgggtaatatcgctgatcgtagccggttcgttttcggggggagagtacttccaacgttcaaggggagtcatgagggatacgttgacggattgcttcatggggatgtccacagctcctggaacaggagaactgctcccaggcgacgcacgaactttgccgcgtcgcctggcattggcgagccaattggcgatttgcgtccgagtcagaccagtgtgttgtttcaggtcatccctctcttgctcggtaggatacgggttctcgtcgtgatctctcagccagcccttcaggatgctgattgccttgcgcgagaaccgagcaccagttttctgagagcgtgcatctgggtcattggaatgtgtattgtatgagactgatttgagggctttccttccggtcaagctgcctgtaggaacataggcattctctgacacgctatgtaatgtctggaggaacttgcccggcgttttggcgtgagtgaaactgcattcacgccaaagagagatacagcatgtacaaccatagttcattataccgcgctttgcaacaaaacaatccaatcccattcgtcggcagaagtcgcacggctcctgagcccggtcgacagggtcaatggcttgtccgacattcacttcggactgctccggtaccgggtcattggagaactccaatggccgatcatgaaccatcgagttgaaatttgctgcctgttcttcgggttcgtcgagttcaatatcaatcgaagcaacatcgtcgtctaattgattagagccatgggcagacgaggcgccctcgaaatcgaaatactccatgttgcgaacgattctaaagggaaatgctgcacaggggacagcctttcaggaccagagtaagggaacaataaagaacacggttcaaagcagaagaggagtcggtcagaagagaaaatagtacccttccaaggttcgtccggggtagagagatgagtgagtaatcaattctggtggagctccgtgaccttggaaccagaggtgggcaccattcacttggaccgctcaaaggcaaatcccgtgtggcttttttttttcacgataagcatgatggtcatgaggaataaggccgaaacacatgcttgggtatccacctcatatcgcaggctccgatgacaatacggagtggaagaaattaatttgagaggaaggaagtccacactgagtgggcggagaaaggcttcgggtggagaatccgagtgaaaaaggaccaaaatggatgcatcggcgcgccctttggatgacaacgctaagcctatttaggttaagctccgtcgagttggggtcgttgcccagccccggtgattcatctcttcgcgatatcggacgtcggctttcttttttatatctgtgttgtgtaaaaggtatactgtttctatagtagcagcgataataaaatagttcacgtggattattatagccgttagatccatgcagctttcctcatgtaaacaacggatcgtcttccaaaggtctgaagctagcttacaatacatgcacacctattggtttgaatttccttcggcgtcggagaagtcgaaacctgttgcctcatgtagatggtttctgtatattctctcgatgcatttggatatgccgccgtaaaatcaacttgtctccattcaagaccataaataccaaagaagatacaatgtgtgatacacgatgattgtacaaaagagaggaaaaagacggagaatgttgttttatatggggaaaatgataattgatggctctaggcagtgaacttggaagaagctgagaagtgacattatcggttttctattgcgctcgtattctagtatagtgacacatcgagccctccatttcaaaatgagagattcgatagattcaggtgtttttttcaatgatgagaacaaaatctaatatttagtagatgattgtttgtcatgactggtataggaagcggcataccttgacgtagatgatttcgcaatatatcgtatgtttcatcgtcgaactcagcctgaagcgatctcaatcttggtaaacgggaaatgattctgaacgcagtttctggcgcaatattccgatatacaacagtcctgatctcgagttcacaaattatatcgattggcggtagcgtgtccgcgttctccgcaagctcaagaaaagaatgttcatatctccgatggagtaagtcatcactcatccagtaaaacttgcattccatatcgcttcatccttccttcatcatcgggattcgctagccagtcactcggagactgagcacataggagtagataaatccgactcctatcttctggccactccttcaaagctccccagagggctgtcaacgcggctgtaaacacctggttgttctgaacggatcggtttcattttcacaagcggcgcgggctagaatatcgtattctggaagtgcaatattgaactcaaggcgtgtgacgttgacctgccgctgtctggattaacttgagggtgcatagcctaaaagaccgagtatgcgacggaaatccgggagtcgagaaggagtgagacatagaatagagaaggtttcccgctcgatgacagccagccatgtcttgcagacggttgcgtacaaggccaaactatcttcttttgggaggaaagaaaagattcgggtaagattttcggggggaagataaggagtcatgttggaaccgtatcaatctccagagggaattacgcgtgaacggtttgccacgcctctcttggaagaaattattcgaaggccggattcctgtttgtctgttgtttcatcagatgtagatcatatgagaagatgatgaatagaatggggtaggtaaccagaagccataaagtgcaagaactttgatactggaaccgaggaatcaaaggcatgttagatgatggcggtcaacaaagatgacttagatatacgggctacctagctaggcagcctgtttgtcagtctaatgaaggacgcggctgtctgcttctctccctactgattcttcatgtatgcgttgagccaaggctagcgtgtaaaaacgaatggtgcaggctctgaggatttgactgaattagcgagagatgcccatataaaatagatcaggctatacttgtatataacatctacagaagatgtataaagatctacaacttcccttttgggttaaagcatttggtggggccttttctccaaagataacagttttgaggggaaattgaacctcgtcagaatctggcaatgttctaaatttcgatgatcggtaattcaacgggtgtttcaatgtccgaatctcatttgaaccagagcatttatacctgaattgcccccaatttgattgagaaaacctccttctcgttatcttagaatgaagcagggaatcgactttcaagagcgcgatttgcctcacatcgcaccatctgagtcagaccgtgaccaataccccgaaggtggattgaaggcatggtctgtggttcttggggcttggtgtgccatgattccgtccatggggctcttaaacagcctgggagccctacaaccttggacaagtacccaccaactccgggattattcggagtcgagtattggctggatctatggaacctacacatttttcctcttcttggggggtgcacaatttggtaatcgtcttcccaccatattgaatgcaatctgaactaacgagcacctcaggcgcaattcttgattcccatggacctctatatgtggtgctcccgggctctattgggatagtactttcgttgattttcttgagcttcagtcatggtgtgttcccaatatctattcgtgtttctcccctatcgtattaccttcactgcgaattcacacatccctacgcaagaaacaaagtctgactctaaataagagtattatcaaatatttctgtcattcagcgttctcggcggaatatcagctggcacacttttcacacctccgctggcggctgttggccattggttcaatgttcgacgtggctgggcaactggggtagcctgcacagcgggaggcattgggggttgcatatttcccttgataattctttttgcagctcctcgcatcggttttgcgtgggcaattcgcataatcgcgctggtatgtgtagtgacatgctcaattgcatgtctcacggtccgcaccagactcccttccaagaaagcagtcacatccatcgacttcagggctctcaaagatatcaaatacgcatccgtcacgctgagtgtctttcttgctgaatttgcggcttttattccaatcacatacatcacgtcctacacacttcatgccggattcgatgaacagatgtcatatgcggttcttgtctttctgaatcttggtgctgtgttcggacgattcctcccgggactggtcgctgatcggttgggtcgatttaacgtcatgatcgtgagttgcttaatgtgttctctgttcactctcatcctttggctttccgaggatctggtcgaccccgacagcttgggaattgtcattggctacgctgtgcttttcggcttctggagtgggtcagctatcagtattgcaccagtttgcgtttctcaggtctgtgaaatccaagattatgggaagagagttggaactacatggacgatagtcagctttggtaccctcgtcgctatccctattgcaggcgctattcagcagcacaacaatggggagttctatgggctgattatttttgggggtgttctctatatttcctgcacaattgcgtttatcgtgtctcgtggcatttgcaagggatggggttgggggataagattttagacacggggaaattatatattggcctacgacatacccggcctacaatcatgtcttatggaaaagtcattttgaattagacattcttcattggagcggataatagattatattcagagataaatcaaattgattgaagtctttaggccttgaaatcgacaagaggaaagccagtttgtaatcgtaagctcttgaccttgtgtagtaacgaaatcattcagagacacatggcaacgagcctacagtatgatcacagcaatatttatcaacagccataataaactcatccttcgtcatctgaccacgatcgagacaggccttgagttcctcgaccttttcgacccttgtcatactcatccaggtctcgaagcttgtcacacacaaagtctttcacctctggtctaatttgcagctcactaacacgtttcatccaccactcgaaaccgataaattgccgccacttcatgtaaggaaagccgagtggattgaaaaacccactaaaaagaagcatatgaacccatatggctcctgaagtctcggaccatttaacatgctcggagagttccttgtattgactttttggccttttctcttcttcctttaccaaagcttcattaaatatgcgaagacaatcgaaataatgttctgtagccaccggggcgtggtcactgttttcgattttccactcatcattgaccggtcgatcatgaagaagccaccaaggagctgatccgaagagctgcgctggtcctgcataaacccactcaaggtccacgactctgacagttgtgagatcgctatcgcttttcatgatcatgtttgctggggtaaaatcgtcgcagatgaatctaaatgggccattatcatccgccgtgttgacaaattgtggtattaacgattccaaaatactcaatggagtatatttggattaaacgtctagttcggcaatggctgaatttggttgatgtcgaagtgaaagacatgctagtccagactaaaatgtcagaccgcctatttgagcagtacccttagacaatgaacacgacgtgaccccatacaaacagcatatcccgcccacaaaccctcacagtacgactcaatagccggcttccactatctcgcctcacaaatttcgacgccaaaggagagagcgtggaaaaatttacacaaaataagattaaaggaaggagaagggggctaggtagtcactacgagtcacaaggggtgcagacactgctgaagggctcgaatcgggatattcatctagactacaagatgcttatgagggaggtccggtcgaatggacagggagacattatcattatacaacagatgttgcgtatatgctgtgaagaagtcggggagaaccacggctgagacttgaccttgctttcgtccagtggatagtgcctggcacctggcatactgagacgagatatcgagttacgcacttactgattggttttcacgtcggaccaaaccatagaatggcagccgttggtcgattagctttcctttgtaatattaatatggtaacaagtcatttctttccaaagacgtattccatcggtgtaagtgtaagtctagcgacactattgaatgccctcactttacatttaccataggcttacctttaattgtaagatgtgcaatgccaagaatgtggtcagttaataactagtagcggctttaaattcagccccaaaactcctgtttgggtaaaatatcacatgtctgccacgtcatcagtgcttgattgataatacaatattgtacaaagtactttattgtaaaaagtacttttaacgatctctatctgtaattatttaatatacaacttagcatcaccaattctggatagctccaaacaagattatgccgatcgacaaatccaaaccctacatacccctagccggcggcgcagatgacggttggtctcacgagcaccaagcgacagctacatgctactgtggcgccatacaacttgcctttgtatgtatagcgcatactcaataccaaggatcgcgaatttaacattaacggggaactatagccaaccgacggtcccggcctagttgacacattcctttgccactgtacagactgccgcaaaatcactgcatcgatgttcgcatccaacttcatagttgcagactcccatctggtacacctgcgcggccgggaaaatcttaaatcctacagccagtctcgaacaatcgcttccggcaaaacaatgaccaacttcttctgttcaacatgtggttcgcttatgtatcgtgtcggcgaggcatacccgggacatagcattcttcgtattggaacggtggatgattttaacttacatgagactaagttgaggccgagggttgagcagtatacaaaggatcgggttgggtggttacatggtgtggagggttttgagcaggctagagggacggcttatggttcggatgtaaaagttggcttggatttggggcatacagataagacggacgttgtgtaacactgtaagaatgaaatccaaactccatcaaataagagtcatccgatacggtgtaagtcgaggcgtagaatcgcgttgagttctcgtctgcgtatgattattagtcatatcggtttctaaaggtacctaaatgtataccgcctttccacaccgctctatagttacagctcccgtattgaagctattcccaccatacaaatctctaaaataccccgtgtataggcgttgaggcctctcagaccattctcaacaatttcatatacatatcctcatctttgatcccacattttccccctacatctcacctggaaacattggtctcttgaaatctgcaaattgtctggtcttgaagagatggcatctgctaattaccctagactacaagtcagaacttcacgttgtatatttttggtagcaattccacatattatttgcctttttgaagcgtaatgatcatgatatctgcaccactcgtttggtccggcgtgaggacccgactggcgtcatttttaatatcccagtatgatgctggtgatagagtttctgctggcgtcaaactcgaagtcccttgtattggaacaagcaatagtcgctttgtggggttttcgattcttgcaggcacaatgaagtggaaaacggtgcagtcatagacctaaataataatcctttagaaattatgttgagaatggtaacaaggggatgtcgtcagacgtacttgataaccttgactttccatatccactttcatctctctgccctcagacagaagtcgatactgctacccaaaatgacactctttcatgcgatctggagtgttgctctggatgatgttcctcatcctcaccacgatctcgttcgcactgtcccatagctgttcgcccgccatcggtgccactcagacagacagtaacggaaggtgcggcaactttgcacggctttacaaccttgtaaagccaaaagatttaatgactcctgttattattgagagatcacgaggtccaaaggcggggctgtcataacaaggtgcccgaaaatcacatgataatctgtctaatccccaaaacgaatttgatatgacaataatccacacacctttggtacacagatgtggaaaatgtactattcaaattattggcaacgcgatgagaaaggggcacagtggatagcgagacaaagaagggtctagcgctgttgtacccataacactgaagacgagaacctgaaaaaaaggtgccatcttgtcatcgacgacgattgattggcaagtgcatcgctcctcaacgatcctttgccgctccactcgagtgggtcgaacccgcccttccggatgtttattttgataccaagagatagggcatctacttttgctcacattgtagcccatactaacccgaagaagtgctcataaaagtgacagggtgggaatttccctattcaatgcaaaaatcatctgttcagcaagtagaatcggttgtgtcgagataagtgagaaattgcatagagtttgcatagagtttgaataacgttcttgttgcattgttcccgatagctttagaagttcaaggccgaaaggcacctcttcggttcaaacatggatgcataaatttgaagaaatcaaattcatggatatgcttttgttgacttgtaagcgggtgtttgaaggccactgactatatgaccatagagataattctagggtggttttaggtagaaattgatgacaaggtttgtgttggtcaagcaggaacaaaactgttgtagcattagaacggcaaagcattctgtgatccgtggcgcactcgagaaattctggcagatcctccggatatgggccgatgaaaaatgaaccaattctagcaggcgttggttccgtctcaatgtctagattgagacaaaaattgaaaagtacaaacctttattaggcgcgacgaagataaagtgaaagctagcctatctgaaagaaacaagaatgaacatgggtctataacagctacgcgaagcgatgtaatatataagattagtgtcggtctgtaaagacgtaagtagatctacaagagcctgcaggcttcactgcgcatgaaaacgctttagtaaaaattcggccagattggcatatcgtccctggctcacatcttgctgagccagaatctgctcggccacatcatgcccccaaacaaactcggaatgaaagttgcgcagttcggatagacgctgacggagccacctttgatgtgttatatcattggtttcaattaccgccatcaatagcggccagtgtaaacgcctgaggagctttggatcagataaaaattgtttttggcaaatgtcaatgatccctgctgtagcttgttggtgaatgcctagcggtaaagaatcgacacagagaagccggcggtggaaaaggacctggccgtagaaggtagaaacggccatgtatatggtgttaagcgtgcgtcgagcggaaacgctgccggcaaattttgcagtgataaaaaggtcagagaatttctggccacaatcagcatgtcactcgacatctagagggaggttatctatactgacttctcgtgtggcgaggatctcacggaaaaggggttctgtggagttggcggcaccagccgcggattcgacgaggaccttccaagtgcgatggcgtaggcaaaatccggcatgcaatagctctagagctctataattttcaatgtcgtctagaacttcctcctcgggatactgctcgccccagaagcatcggccccaaagacgagcacatcgataaaggtggtccggctgcaaagcgggattcccagactgggccacatagtcgttaagtgactcggtaagaccaatgggacgacagctagcatcgatatatctgttcatttgttagtcgtagtcgtttttttgttgaccgctggggatgaatcacagaatccataacaaaaactgctcgggaatgaaggagaccttggccatggtcacggtatcaccggtcaatgtgtcgactccgggagagaagaacatatcattaacatctttaattcgaaatagttgtggatgtgtttccagaagtgaacgcacgccctgcaggtggaattgaagctggattcccattagccgactaatagtgaacacagccaggacacaagattcttacatggcgtactgagtgtccgaactgccactcccatgctatcatcaagaatacagtggcaaaaaccgtctcgacatcttccaatgaaacctggcgcggcgtctcaagtaattgcctgaattctttaaccgcttggctgtaatggtactgaccatggtcctgagagcgcataagcagcccattgcgatgcatatcagatgcacttaacgccaatatcatccgcattattactctattcgatgcggccgggccttcgtagagatggctaattttgatcagttagccggttgaattttattgtaagccatttcgcacacgcatgaaagcctcaccataagccgctccaattccatctcttcatgtagtaaaatacgagtgaggaggaaggaaagtactggaaatattgttgatcgagagaggtgagtgtcaatgaattggcgcacgcgacattgacgttcaaggaagggtatatggggggcgaaattggcgctacgttgaatgtgtcaagacaaacgtccgatgtccaagagatcggcgagagacttgtggaaagggcatctggttggaactcgacaaggtcctcggctttaggtattgaagaggcttgttcggaggttccgggtgcaggttcaaggtgacgaattcgcgtgcttcgtccatgtttcactggtatcccccattcgcaatttaggcgcaaggatgagcatcttgcacaaactggtttctcctcaccgcatttgaccttgcgacggcggcaggtactacaacctagcaagaagtgggttagtcgcgatgtagatgaggtaaaagtaatgtcctaccactcttggaacgtggtccattacgcccaaaaccctgcatggacatgaaccagcagggatcaacctacagacatgagcgaaaagaccgaagagagcgaattgaaagaagtaataatgaaagggtgtcgggacattggaagaattcagtgccgaggccgataagataacgcggggaaggctgagtcatcatggcgttgctccgactatttcccttttcggatgtctatcgggaattcacgttcttatgccgactcttacgacttcaattcggtcgcaaatgatgaaacattaatacaccaaaaacttcgatagtgaaaaaataaatgggctttacaaccattggagtgctatgtactaaaaatgcatatactcctcccgcataatctcgtttttccattggcgccgcgccacatcatacatatcattctccacaatcatatcccaaccgatcaatgccagtgattttccaacaatcaatgcctcggcatgagcttcatctgttccagctgcagctgcaaacgtcggatgatgtggaaacgaagttggcggagccggaatcgcaaacattgtgtgaagcgtgggggtctcgtagcttacatttcctattatggaagtacatgggtcagctatatcaactaaaggttctatagggtttagataccaatgtcagacgacgctgttaggaccttgtcatggcgcttgagaacattgcgaccatactgtcccatgtgaacctggtagcgttcacagagagtatcattcaatcggacatcggtataaagttcatcccttgaagcaagcatgttagtgaccagttcatcaaatacggctaaatgggttcatactcatcaatcttgacttgacaaccggtggccaaggcaccggcctcaatgcaattacgcaatttaccgatgagagtattcaatcctttcaaggtagggctgcgtacttgccagaaagctttcgtataagccggtatcacgttgactaccttgggtgtatccaagaaagcacaatgaacacgttgatccggaagaagctgctgtcgaagaaccgcaacgttgttataagacgagaccagagcatcaagcgcgttgatcccttcccaagggtttccaccggcatgggcattcctgcccgtgaattcgcctagatatttatcagcatgggatacaaaaatcagaattggagcgactcacagtaaatattcttgcgggcattcatcgacgttccagctatgccatcagatggctcttggtcaggataaatctttttgggtccagggtgactgcaagtaaagtcagcacataatgttctaaaaatactaagatgtatcttacgccattagcgagatgtcaacattcttgtaagcgccggcatcaatcaatttggcctttccgcctccactttcctcagccggagtgcctaacagctgggttctaccagggataccaaatttctttatggcaaacgacagcgcaaggaacgcagcaatactgcttgtcgctatcagattgtgaccacaggcatggccaattccaggcaatgcgtcatattctgcgttgaaattgatcaaccgtccatcagttccactcaaaacctcaaaggaggtatctagaccataggcgtggcgagtaacactaaagccttgtccttcgaggaagtcacaaatcgtatcgtgggcgcggtgctcctggtaagcaagctctgggtttgaccagatctgggaatgatcaccaacatgttagccttgcagataaaatggtgaccgtagggactaacgtacttgataattcaattcccgcaattcctgctctagttccttgagcgaggcatccacagaagtcttcacttcctcgatattgatggtcgtaagagtcatagtgatttaactatatttttcaattcgagccgtgtaaaattggaatccgccttagaaaaaggttcagtgtataattcctgttgggatatgagcaactttcaacccggattgaaacttgatcaaatagtatccgggtggcgtttgccaatataagaggggaaggcgatgccgaacgatatgtcgcattgtcctatcgccaatgtgacaatggaggtagtagtcacgaaattacgcctatcatttgccacaaacttcgtagcctaattttacctaacactatgcctctttaccattttcgccgttgttgtctttgactctttatcgggggctgtatggaaagtgggttgccgatgaacatgggcatccacattgccgacgaggcaatatgattcgttggactgccgatatggtaatgccaatattttgcgcctcacgaagtctatccaaactctagtatctggctacaattaagacctacatggatcttatctcggcatccaaagccacatatagtcatctctgtttgccgtccagtcttcccgtgttcattgcgaacgatgtggtttccgtgtggtttccccgcctattcttgcagtaaaaccagctcttatcaacgtaatattgactggacagctcatgaaaatcattggtctggttccctatcagctattccggtatcttgtgagtcgccatcggcttggcctcactgccctgaagtcatatagccctctaggacgcccgcaaattggttaataaaatctgatatcaacaatatttcttcctcttttctcacctgccatctacctatcttcttctctactcatttagtttagtcagtatgggacaacaagacctcccatccgaaagtataaaaccagaccttggaattctcaaggttgagtcgatttctgctgctcgagatgtcgatcttggacagctgtttgaggttgaaacaacaccagaaatggagaagaaggttttgagaaagctagacttctttttgattcctcttatgggcggttgctacatgctgcagtacattgacaaactagccattagtcaggcgacccttttcaatcttcgacaggacttggtatttcccctttcaattcagtcttttttgtcttcgatactaatatgcttccttttcactagggcttgaaaggcaatgaatataactgggcatcagccatcttttattttggatatttcgcatggagttggccgagttcatatctggtcgtgaggtacgtttgagagatgatgcataataacatatactaattatgaatcctaggcttcctttgggcaaatatctcagttgtgctgtttgtgtttggggaggttgtgtgatgtgtcacgccgcttgcacaaactgggctggtttaatggcagcgagattcttcttaggcattggaggtaggagttcctctaccaataaattccaatttggctaatgagtgcattttgacagaggcatcgattgctcctggctttgcactgataacgggaatgttttatacaagagcggagcagccagcaagacaagcagcatggtttattggtaattctattgctgttctccttggtggactgattgcctacggcattggcaatatccacggcacggctgttgcccaatggcaactgttgtttcttgtcttaggcgccatcacttctctctatggcgtcctcttattctttacactaccggactcacccgcgaaggctgtctttcttaagccaaacgaacaagcgatcgccgtccacagaactttgaagaacaagactggagttttggacacgggaaagttccaatggggtcaggttttaatggcggtaaaagacctacaaacatggtttttggtgctttatacactgtgtgtcaacttctgcaatggtggcctcacaagtttttctgctatcattatcaccggatttggattcccccatttagaggctcttctcatccagatgcctattggtggcgcccagcttgtcttcctcatccttacttcgggcattgcctccctcgttccaaagtctcgcattattatgatgatggtcaatacttcagtgtcgatggtgggtatgattttaattttgaagctagatagtgataatcaagcagggaagatgaccggtctctgcctcggtggtgtcttcgctgccaatatcccgctgtcgctcagtttgattagttcgaatgtcgctggatttaccaagaagagcactgtcagtgccctcatgttcgcggcatattgcgttggaaatatcgttggaccccagttcttcatcccctcggaagaaccttcatatctggtcagtacttcactctcatgatctgtccttacccagaagtgctgacttgataagaccggtattaaagcatctatggctggactggcctttggaatcttcttcttggcctgtctctatctgttttatgtctcggaaaaccgtcgacgggataggctgtacgggtctcctgtggagatgaccgagaccgaagaactgcaagacgagctatctaacaaaaccgatcacgagatcgaaagttttcgatatgtgctttgagatatttcacttcgacatgaatttgtccggggatatgaagcacatttctgctgtcttcatgcgtcctgtgattttgctcttttgtatcccactgtgtgccagacgagcaagtattttccaacagggcccttggcaaagtcattagagaaatactagcgcgaaaagatcagcaggatctacattgacagaattgttatggatgggagtacttcgatcgatataaaaggtctctcgccttcgccgcaaatagagattacgagtacataaaaatataggatttgtttcctttgaattctgatataagggcccagagctagctaaacaataaaaagcaacatgacacagagcaataaccttttctcggtgtgaaatttctagccaaatgaacatatgcaaactcattttcctggtaggatggttgctccggaaggtggttatttgacgatttcgtatgttttcgctgctttccatttttcgaatgcaaatgcttccaagcctgcatggcttactgccacaaaccgggattgtagtcccggaactctccttctagaacgctcggtagacgaatctggcccttccaagagatgccaggatgccggtactcgctcccagacattagagactgtcgctccagtccaaaagttcactttagattgccagtcctggccagccaaatctatcttaaccaaaggccggaagtcttgaaaatcagaatgacgccatctgagccagcatattccatggcatgcttgaacgagtagttggtatagaaaccaggcctaaactcgtggtcaaaggtttttggagagatatgaagtgtgaggaatgcggccaggctagccactgcccggcgggataaacccttaaaaagaagattaccatcttcagggtatcttggtgagttctgggtggggttgttggaggattgctgtcagcagcgaagtcatctgacaacgaaggtgtggtatggtcaggtaatccagctggttggtggttctcggccaggcgggatacgttacgtgccaagtcgaactggaaagaaagagtgcattcagacaagatactaaacgtggagaaagaaaggaaagaagaacaggacgcagagctacagtgtcgtccttatatccccaggggcaaagccctatcctcgcttacttggtgaggaaggaacgagtccagcaagtgccaatcgtagaagcaagttgcaaagtgggaagcagcccattgatatagctgccactttacaaacaatgcgaacctcgaacctcctcgcttagctattcaacaaacaacctatttatcaagcagtaacaatgcgaacagtaagcgagcaagcaaatatgaagcatgtgatagcgatccatgtggatcgtgacactggtactgcaaagttcagtcatagatccaaactccctctgtaacatgacattcccttgattatcttcagcacattgcagactaatgtattaggaatttccattttcatttttatcaatgaccctatagctttagaaattcaagtttttgctccccatttaggaggtcagttacacaatttggtaaccgtccagaccgaagctccataacgattacagagatgcctaaggggaagttcaaagctatatttctgatatctataatacaataggcatggcctctatctataagggttctaattaagagatccccattcaactggcctgagtgtaaaccgtatcgtcggtgacagcttctgctggcagccacttcccggcaacggtgtttttgtacgtgagttgggcgagtgtaaaagtgtgaagctcggacaccagaaccgtcttcttcaggggcaagatgcggtgtaccatggcgttttgagtaagcatcgagatgtactcttcgtcggctacggatttcatcgaggcgtcaaaggtcacgcggatcaaggcatcgggcgagtctgtgctaagcagcgacgtagataagagccacaaggctgggccggccgcagtcgatgcatcggcaatgtgcagtaggccagcgttggtgccgagcagcgggtgcttgagcgtgaaaaactccattgtgccagaggctccaatgtggccgaaagtgccggtgccaccagtggcattgccagcgagagtgaaccacacaccactcaaaggaccggtagcggaaatcatcccgacggcgttgttgccgacgctgggcgggatgggcatctgattcgtctcgccgctggtagtattgatgcgcaggatggacgagtcattgtcttgtgtaacatagatcaaaccagtggacggttcctccttgataaacaccgggctgttgagtgcaggatacagtatgtagtccttggcattgtggatatccgcagagaacacatagtagttgccattttgctcggatgccaccttaagaccggcccagacgcggttgccgatctcaaacacacaatgcgggccgttacccggcgccgggatattaatagtcttcttgatgatcggtgcagtcgagagtttcttgccgggatccacaagcagtagcttgttttcgccctgcagtgacaaccacatcatgccggggtatatcgttgatggccacacgccatggagcatggaggtagtgctgttttttcccatggggaacgagtggtaagcaattggctcctcagtggttgcatccaactcgatcttgataagcttgctgtcagagatctgcgtcaacaagacgaaattcgagttcggcacatgtgcaaactcatgcgtctgagtggcgacaggcataagatactcggtgaggcgacggctcacaagcgaatgagaggaactctgtgccaacacggtgctggcgctgagcgccagcccgattacgagagacttgcaagcagagaaaaacatattcgaaatgccccgcttgacgttatcggggcttcaaatgttgatgtgttcgcacatgggaaaaagcactcatcttatattcactgcttccaaggttgtcagcttgtcagctcatcagcttggcagcttggcagctcagttttctcctccacatcttgcactagtgatttacatagtagttgaatagtctagcctactttataatttcttctctcctatcaatcaaccaattaaaaatcataatttcaccacaatgaggcaattcggaatctgcggtaaaattgggtagaaagccagcttaagtcgcccgcgagtactccgtaccttggaatgttgacttcagatcccaacctcgaagcggccgaccgaagaagttaaatgaccgtactattcattatgaacgccgagtatcttgctcgagtattccgtgggccttcattatgtgtggaataaagtcttggtgggcctggaattggctttattggtagtattttcattccgtccaagcttgcgggtacctgaaatctcttgcagcgccctacaaggtactcagtatagctcagaaaaatcacgcacaaccctttggctggtatatagccgtcttaccacccccatacctgtaccaggtatgggtctgtcccacataacgagagtttctcacaaaacgagagatttctctttttaagtatctttaatatggcatacccatacaaaaggtacatataccccatatcatgttctcaaccctttggctagttaaaggagaaataagagtataaatcaataataaatttatagttaaattaattggctaataaaagaagtttcagatatcttatatagaaaagtaaagaccatatttatgaaagagatgtatatagaaacatcaacgttctaccacttggagaatactcaatatttcatcctaatatattaatagtaaataaaatagacctcctttagactatatatcccctactatatcttttgtaagtattcctagaagtgacaaaatctctattttatgttcatgtaccttttgtatgggtataccatataaaagatactgtcaagaatgggccctaaacaagaaccttggtttttgttatggtctagtggtaaattacgctgtacgaaattcaacagatacctaaaaagagaaatctctcgttttgtgagaaactctcgttatgtgggacagacccaccctagttaactcagggtgggatggtaagacggctatatggcaagctgctactaagtatgtgctctagctggttacaagcttcgcaaattgaagggataacccatatacatcgccggttcagtataggcgatttgtttatatattgtaaaccgaaccatagtgaccgaacacaaggaatttaaggtaaaagctatccattagtggagttgttcctgaccctccaaatttcaggattggcttaccaactctgcaagaaaggtattgaaagggaataagagccggatgttgagaatgttcgacatgtaagtatcgtaaccgagagccactcattctccgcagtatagagtctctccaagtcaagaacataagcagttaccgagcagataatgctagagcatgccgtatgcacaacactcccaaaatggcaagcagtaatttatccgggaaggagcccttctcaaaagccttatgttctgattgggtttgtatagaaccacgcacgggtacacacaaagccaagtgcgctaagcccaaagggccaaaactaaactacattagtcctctgccacaggtccactttgcccttggctcatgtagccaataatatgtccttccttcatccaatatctgtaagtcgaggtgacggcggaaacaccacgaatgtgcgtggttttgcagtgcacgtctagcacagctacccgcctaacgacacggtatagatacagagtgaccttacccgattcggtttagcgtgactttccatgctctcatagtatggcgggtccatcatgagggaagtcggtgctataagagggaagtcggtgctataagagggaaggctcatatgttcaaccaggagtctatgcagtcgaatgcctgttcccttgattactattataaggcacgataggtagcacggcaaacaacaacacacatcaatgacacttgttttcagatcaaaggaatttagtgaatttcctcaaagacccgaacaatgaatgatttccccttgataaccaccttctcccctgggatcctccatgcgccaataccctctccatcaaacccatttttgattgatggtacgtcacctgcatcagggccgatgacatatttgtcctcccatccagaatcccactcttcccttctcgcactaacttcacccccggacctcttgagagaccaggcaccgctctcatccttctggccggaatgtgtctgggtctgctggagtgccaagtaggttccccagatccgtcccaagaagaccttggtcacagtcacctctttttgctcaccaacggccagaggagcatcatctgactccagaatccaggagattcctttcttcgctccttcaggaccctccttgaagggcagctcttgccaaacctcttcaaaagccgtcataggctcaccgggcagatccgcccgaggcatctctccgcactcgaggtcggtaccatcggcctggggactgaagttgccaatatccacgataccgatctcattcagggagtccaactcgcgcgtgaagagcaccttgactgtttcttgtcagtgaccttcaatcaaaaggtatttccgacaagtaatttcagggcaacgaacgtggaatttctttgggattctcctcaattctagtaccggccattgcccagtcaatggcgccggatttcttatccattcgcaaatccacgaaccattctcccacagaaagaacaatggtatcagtcgtctcctcaggaatttcaggaacccatcggagtgaaagacgggttgagaaaccgcaaattgatcctagttgagcacccgtggcagacattgtgtatgtgaagtggtttgtggtttgaatgttcacctggccagtctaattataatcaataatcttatcacaatcgccgaggcaggactcggtaagtaacaccagttgagtttcgcatctcaatctaactgtcgcctgaagttcctgcatcaatcaccccccccgctgccccagcttacgtaacccggatgttcgccgaatcggggattttgaagcgattcaacgattggcgatggagaacggtggggtgattcaactaatggtgttatctaatgcacttcgagttcattggaccgctgtcgttgtaagtgattgagccaataactgcattccaaagcataaatcggttatcaaaatgtctcgaagagtttcgggccattagcttccagcgaaatgtatcaatgatttgcgtttttgctatttagtatctgataaactagaggttctttactatcttctgtcaaatatagagccatctaagataagctcgattggcactccacaccaatatcaccatcaattccatcacaagtaatcactgatggggtacacttgccggacgaggtgccatgaatattctcgaactgaaattgacagcggatgggtactcggcgcaagtggtgctgttactgttgaagtaatattggtcaagaacaatgggaatgtcggaatttctaacgtggatgtccttagatgtgatattgtccgaagccgtcgggccaacctaggccttaagcgggctccggtctgtgtcatatcagcgagtgcattattgagaaatataattatatcttacctagctgttcaggatagtaacattctcgatccaggcgttcttaatgatatcctcgacgccagagtacttctaatacttcctatactcatgccgtcggtgttattgtaccgcggggttctacacgaaaatattggcatgtagtataagctttctacctagccggttggaaggattcaacaccccttaaagtttcttgctagcctgaaccagcccatagatacagctgatgttaccagaccaccaagctacggagcgcatgaagctcgcaggcttggttgtgatgtttgcgtagagaataccatacaccacacgcgaaatcgaataccaaacaccgatggtgttgatcgtctcgttgggaacaccggcaaacagtgaaatcaaaactgcattatgtaatcagtatttctgccgaggtccaggcacgaaaggggcaaaagcttaagcaaagagggggatcttactggccgccacaaacagggggtagccctcctgggcattcgcatgggccgcctcgcgacgcttcagcttattgagcgtgtcgcggctgattttgccagcctggaccgccgcctcgccgtaggtagtcaggtcctcgcggggacagacattgttgtcgatgccgaggcgcatcttcgcgccgcggttgctcataagacagaaggcccaaacccagtttgcgatgaggaagccggaggcgtggttggcggcagtttggccgggggcggcgcggaggccaattgtggtgaggagagcactgggttggttagcttcgttgtcggttcagcgcacgattagggtcactcacgacattgtgtgtggatttgtgttgttcgctcaagatgcggctgggggaggtcttataagcgtatgtgagagagcgagagcgagagaccgagggatgagatcatgtttgtcgatcggatccactttcagcagtcaggttgtgaagatgagatcacggctgtctgcacttttgattctgtgcttgtgcttgaaattgggttgttctgaacatggcatttgttctgacgtggcatggaactgacacatgtgaccacggatccatcgttcagcgcttgcaggatttacatcagcacatcgaaatttgttctagagatcacgctggccttggaaatctacccatgcctcgaaatgggcacaaactctttcgagagaagccccatcaaattgcgcaggatcatctataattggcgacaagtgtttggcccagatttgatcggcgttccatccccaagcctttctttcccccttggatctgcaagaaatcctttttttatataggcctcaatgtacctgatggcgtgagagaatgtggtattaggttcagccctgtgagtggttcgatagataacatatccacaatccgggagcggcgaagtctgctccgcagctcgccatggttgcgcgtgactggtctggccgaagtcgcgagaggagaagagatcgagtatatgaggagggaaagctccgagctccaacatgcctagagctagaggggctgatcccaagacggtccgagtcatgctcttaattcgagtgttgtgttgatataatcaattcactctgaaatcatgcagctgttgcattcaacaaatttttcaatccccagccagtccatgtaatcaacgcctgtcaacggtaaggttagattatggaaggtggagtatatcacctctgcttcattgttcatttagagatgatcagtcactgttgtttgacactccacggtacggacctacctccaagttggagcaattcttgcaattagtacaatttatcatgttggaactttgcttgcattgttcacaatccttgcagtcactgcaaaatgaacagtcggtcagagcacagacgaagccaagcagaaagggaaagcgggcggtacacagcgagaagttgaaggagcgatgacaaggacagagagccttgaactgaaagagtagaggctagagctaagagcgaatttgttgtacccatccgatataagattacgattgtgcgtggtataggactacatgattgtccctcataactagcccaaattgcgggcgaagacccactattttaagattttgacctgccacgccaccatcgactaaaggaacacacaggcctttttttccctcatttctagcgccaaaacattgggggcggcccccggtaagaagtacgaagtagagcccctcggctgcattgtggcctgccattggctaatatccgagtcttacctgcattgggaaatgatcaattggtattcaatcggcatgattgactcacaatatgtagaacccgtacaatttgatgcgaaatggggaacttcatctcagttgaatacttggcagctggtcttgaatgtatacctccccgaaactcatcttgacattggtatatcctatttttacgtccatggatactccgtagttaccgcccccacccgggcagtgcctacaatgcagtgatcggcgggggccattatttgcacataaaacagactagcttactagtctcgcatgccgcctttttaactcaccgtttgccaggaccgtaataactcatgttgtttccccatcgcaacacttctgccaggccgattccgccccgtatccctttacctttgattctaagctcgcgtcaatcgtgtcttaagcgcaatgtccgaggaatatgtaaagggatacgctattcgtcgaaatagcacatgcgagaccggcgaaaaccaatgtacgaaaaaagcgacatggggtgactaccaggcgtgttgtcctggaaattctttctgctttgattccgatactggaattcccaatatcatatgttgcgacaatcacaacaattgcacgcaagctatatccgtcgctccagcatgtgctgacaggagctggaatctattcgacgggaatggttctttctgctgtgatcaaggagagtcgggatttcgtgttgaaaatagagttttggttggttgctccgaggcaacatccccgggaaatgctagtttcatcaccttgccaacgatatcggtcggttagtttatcgcataccgacgacattcaatcaaaatgaccgattaacactttctcaggtaaatctgtcgcaagttcaacagcgacgtcttcatcatcgccctcttcatcatcgccctcatccccatcaacctcgaaagtagcatcaaatagctcgagtgcttcctcgtctaccaacgtaggcgcaatcgctggtggtgttgttggcggcgttgctggcgtagctgctatagctgccatcctctttttcttcgttcggcgccgcaagcaacaaaatacccagacactagcccaggcaccgtattcgcctccagtgtattcagaagtcggaaatggcctaccccgaaaagagcttgatggccaaacaaggtcagagatggatgatacccctcttcgcgaaccacaagagttgccgacaagccattgattatgaaatgatttctgctttcaataacagccctgattatatgataaagcacgcttgactgaacaggggctcggggtttttcaatgcattccatggatgatgaccctttagcgtttctgtactcttatcttagctcccggattttactcgagcatgaggccggaatgagaattgtggcctttgcgatcgtgacgacgaaagaacgctactgaaaaatttgactattatggtagtaatataaaatatactaagcgatggggaaatggatcggtgataccttacaagtcaaatacacaaagatatgactgactgggaagtgatacgctttcgcaggggggtgggtgaatctttataaggtagactgttgtatgagtggcactttttacaccgcctagccaacgccaaatcaagtctgcaacttcattgaaccgcccctgttgtagtctggacctgctccagagactctgcaagagacgtcaagcctagagtatcaggcaaattttctctcatcatcccggtggatttctcacagcgacaacatctaatcacgatgacccacgaattcgagtaggtaccccgcctgcagatctagaatatagaatatacccatactaataatttcagatgtccatatgctgttggtaatgtgatcaagattcacttgaagacaccagatggattggaggcaacagcagatgccaatatcattaaagtctttgagccgttcactctttcctctgtgatgcttattcggatggcctgctcatctttaagaatggaaggcggtatgattttgaagctctttgatcggcgatttgcagcgcagcttcgggaagacgaaaagattgggccctggatcccagatacagagactgagtaccgacaatttatctttgatggcggtgcatcagagtttgttactcagctcaacgacggtaaaacacctgaaggcagtacatggggtgtggctatggacgaaacttgtctttatgatcacatgtcagatctatacaagacagaggtccaggtatatagcaacctgaaggagattcaaggcaccgacataccaaaactccttgcatccgctattatgcctattccctacccaggtcaaacgagcagcgaatataccgatattcctgggatccttttgcaatatatcgaaggcttcccattgaccgatattgaggaatatacaccaagagaaagctggcaggccatctgtgaagacgccattcgagttatcaatcgtatcggtgatctgggaatacttaatgaggatgttaaaccaaggagcttcattgtgcgtgaggacgcggggaatagattcaaggtgaccatgatcgattttgcgctatgcaaattccgtcaagactataaagatgtctatgactgggataaatggaaatcgatacaggacgaagagggggcagtggggtatgtcatgcaaaggcgtttaaaaggtggattttcttaccgtcgatctgctcgatacgaaaagctagatgaggaattcagaaagggtgaatgagttgagactgtagggaaaatagaaatcaatatcaggccgaggaatatagcgtctgtatgtaacgttcaacctgacctggattcgaaacctcgactatgaggccttttagggaccatcacgacaatgggttttttgccaggcagaaaattaggtaataaaataataccgcctaactaactagccaggcgccaacacacggtatgtgttttcgacacgattaggtgcgaaggctaagtataagtaatattgatgcctgataatcccgaacacccttattctgccccctacaacgttggtggcgaaaggtaaaatctactgttcaatagttctgggatatcaatttgaataacaccccccaataagggttcttacctatgccgtgttgttgctttacccgtggcattctgttgctctgtcccagatgcaacctcgacgcctgtatttaaacaggagagcaagttgtggggataaggatcaaccatacacactactccagtacacaagtaccagtgctttctttatcaaagtatatagcattacgttcagcgcagagcaggcgatgtaaaaccatcatattttggtagccgcagatattatacatttctttattagcattaaaaaacaagaatgaaaaaagaaaagaaaaagaagaagaagccagcaaatccataccgccaaggctatcaccccaatttcccttccatctgccgactccagagtttgcggtcgaatcgttgttctagtagcgcctgcgcatcacccgcgtacatgaaaactctaccaccggtctccttgggctccttctcgtctttgaagtagacccagcagtctgcaacttcgtaggcattcgtctcataatatgatagcttctgggcctcttcttcggatcgcacgaggtacgcagatcccgtcaccacatccccttggttactattgatcagtgcaggataatcaccccatttcgcaacagcgtaaccaaacatctctgcctcgcgaagttgcggctcctccggcaggtcaaggatccttttcacctgggccggggcggtcagagttccgtagaagaagtaatacactggaaaggcagacgggaagtcgaccggctcgtcgcgctgcgcaaggtagtctggtggtgctgaccggagcatagtatagaaaggtgatagtggctcctccttggctgggaaaaggcccggaaaccgggttgcttcggaatcctctggattcatgaaggctgtatgatgtgaaagttggacaaaatgttgaagttagaaggctcggatacggaacaaaggaataagtgggtgctcaaagagaaaccagaagaggcagtaataataatagggttaaaactaaactacattagtcatctgccacaggtccactttgctcttggctcatgtagccaataatatgtccttccttcatccaatatccgatatggtgtaaaaggccgtgacggagaaatggccacgatatgccgttgtataaattcgaaaactcgtggtgttttcacataggcattattttaggccattaattgacactatactaatttggacactagcgcgaaaatcgatcagagggagggtcgtgcagcgcttctatcatcaatacgaatagaatataaatggctatgtctcctacagccctgaccgaaatatttctatatcaaacgcctaccaaagcgctttgtaaaatcgtcatggactgaaattagttcatccgaaagtcggatccgcaggttcaagcagatctttcgaaacccgcacgagatcaaatgcgagaggctcggaatgcctctcgaaggttatcaacccttcattcttcttatcggacggtggctgaccatctaatagatttacaagtcaccttaatccaccagatcacacctattggctgcaatccgagaacctcacattaagagtcattgaaggggttttccgctggtatcatgaaaactacagcttaggatatcaatccggctttctcaccatgactcgccccccccccccggcgagatagactagcattttggcaatcagggaccgagaaacaatttgttgagatacaaagtataaagaaatggagagcgttgattgattcgaagaagaggagagaagagagaaactgcaaaatacataaatatggatcgaaactatgtaaagggcacgggtgaggtagacgtgagacaccaccacaacagttttcggccccctggttgtgtcgctttccaaagtttgtcgcggcgcttattgcttgaaagcatgcggctaagggtttcctggctatgcgagacacctaaagctgccagatcctcgggtagagcgtgcaaaaggaactgaagatgaatttgaaaagaattactacttagaaaatccgctttaaccacctgggcaataaagaggtggcggtatttctatggcttgaattacgcataaggcaatagagctctagcagcgatctcgtagaacaaatgtgttacgcacacaacgtatgactataatcgggatagagggtataataaagctgggaaattattatagaagtatatacgtacacaccagggaagttagatcgatatcaccgcgttgaaagttcgtaaggtccttggcgggaggtctgcgaatgttctgacatattctgcacgctttgttcagactgagaggtctgttgggcgctttgcccgtattctgaggtttgtgttgaggttggtggaaacgcaatggcccgatcgtagtccaactcatggaacctgataggtttggtgtctggagcttccacgagcgccgtaggtattatcgagggaggaggttgttgcgaataccggtttgccgctgcactgtcctgactgggagtccgcttatatttttgacgatgggagataaaccaataagctgcagcaacggccgccaaagcagcaataccgcagcctgcgccaatgccagccttggcgccggttgagagaccagtgctgccggtcgaggtcgtcgtagtcgtcgaggtcgtcgaagtcgtcgagttggtcgtgggagaattcggggatgcaagtaccgtccaagagttttcccaagtaggttcccagctattcccagaggatgtgatggtggtgtcactatcgctgatatcgacaacattctgaatgtaagaatagtctggtccaggagcctgggctaagaaccaggatttcttggaccagttgacgccgacgaaagcagcctgtagaaaggcacgaccaagagctggagtggagtcggtgcccatgcatgggaagtattgtgtaggagtggtcaccaagggggcttccagagtaaggttcagaagagcgaaaggaaccttgatggtgatatcctcagtgttaacgtcattcttggtgaaggtgaaacctaggtagctgggggatgtcacaattttggtatattgcgaatcagttgtgtcccaaaagtagagacccagatcggaattatatgtgacaggcagattggcggcaatggcgtcgcacgaactttggggtagatagatatatgggcttgctgggtccactgctactgtgaagccggaggtcaaagaggaattgctttgtgccagcaatcccgtcatattagaggatttccagggcgaaccaccttttgcaaccccgatatatatgtcgattaattcaatcggaaacttcccactgtcgactggctgcgcagagacgtctccaaagactcgaccttggtcgtatcccctaagcttgagagaaccagatataccgaacgaggcagagccaatatgcataccatacgaataggacgggatttttcctttatcgtagagataactgttggcgaatgtggcattgatagggggcaatggggcgtctctggtgaatgtttggttgatgtacggacatcctagagaaaggacacccacttccaagggatagttcttcctaccgggatacgtctgatatccctctaagactgtagtcaaatctgcggactgcacaacagtgcctccaaggtccatggagtctagcgctcgagatgtcacggcgttgataggcactgcgttggtatatcccaattgcatgtctgaccattcacctgcatttgaatcatatatagatgtatcgttgtaagttgatgaatcgtggatgtcgaaaagaccagctgaatctgcgtaacagataggtgatatttttgtcgtgttgtcgcaaattgttaagaggagaaccgtgctcgcccaagatcctccgggatataacgcgatctttgtatcgttgccgctaatgcttacttcgacggcctgccagggaccatcaggtccaaatgacccagaagcctaggtcatgctccaaggagctacggcggcagcagagctatcgatatacaaactctaaagaagggttatggcccagagcaatggattctttatgccttattagagtgaagtgtcagccgaatctctatatcgctgcttaaatctgtcacgtggaatcaagccgaagtaaacaaagttggcttacctatagagttcaaagggaacgttggaatcagaggataggaaccacggttcgataacggttcgttcggcttttccagcggatacttcgagtaaacacgcgatattcactaaaaatagaatcagcacgacttgatgccagtgaaggaagaatactccgttgttaaacaggatattttctcagcaaccgccggggacggacgcatgtgaaaagccaggaagttgagggagattttggacggagcccactacggaccctttttggtattaactgttttaggtatgggttcagctggagattgattaaacacgtactaatgtacagtccactaagtacgagtatggagtacaataggggcagtaggcccgatccccttcccaccatacgaacaggtactagtagcacctgggcaaacatatacagaatccgatttgtcattgctaaacaaaatatggcattgggctgatacctgggtgcaatttcgtacactgtccgtcttgtaatacctgctaaatgaagatcgactcggtccattactcgataaagcatagcattgcacccatgactcgtagtcggcttgcctctacaaggggtaagaattgacaaattgcaggacgaaatacgagtataccagggtttgtgggctataataccaatagtgataagatccctatattttggaaggaaaaataatatatacccatagacctggtttctgttgtggacagaatttggtcaaaacgtgggaatcggaactggcagatctgtttgataataagcatggctttgttcaattgatgtatcttgaggccctaccctgcccgctgcccaggccttttccgctgcggattacgctgtcgtccagtaatggtgttttgcccctaatttgtaagaaattagtgcggtttgggaccaaatgtctcgctttggttacggagcagattcggggtctcctgtgcttaccccggcggttagcttgctgtcattttcaacctggctaggctgacaggtctaagacgaaggatttcttcactcacaccacgccataagtaaagatacgatattgatggctaatcgctagactttgcaagcgatcataccatgactgtaaccaaacccctacgcgctgtatttgtcctgatatctatcatattactggtgatctttcttcggattcgcggcagttttggctatcttaggccataggttaccatccaatttgggaaagaagttgactggactcgctttgcgtatatacaatatgtcaccaatactgagtatctgtgcaactcggttatgctatttgaggccctgcatcgtctcgatagcaagcccgaccgcttaatgatgtaccccgattatttttcggtcgctggtgacgataattcgagggaagcggaattactccgcatcgctcgggataaatataaagtcaagctcaagcctattcaagttcaaagcaggaacggcggtgaccgtaagtaatttttccctgcggtatacactatggtcgctttgccagtaccttccttgaagtgtccctcttagctaatatcaaccacagaaatatgggcagagagctatacgaagcttcttgctttcaatcaaatacaatacgacagggttttgagcctagactctgactctactatcctgcaagtctgtttatcacaatgttgtcttatcgttcctactaacctacctacaggctatagatgagctgtttctgctcctaccttgccctgtcgcaatgctacgagcctactggcttaatccagacgactgagtcctaagttcgcaattggttcttgtcgaaccgtctacgtttgaattcactcgcgttatgcaagcgattgccaatgcaagctctggcgactttgacatggaaatcgtcaacgatttgtacaaagacagcgctttcgtcctgccatactgtcgctacgatcttttgacaggagagttccgcggtaaagaacatgccggctaccttggaaacccgttggaagaatgggatccctatgctattcttaaagagaccaagtttctccatttctctgactggcctgtgcccaaggtttgtgctaggattccaaagtcgacccaagatgctaacctgtgtgaatgatagccatggatcgaagctcccaaagatattattgaggaaaagcagcctacctgtgatttcaaccctctgacccaacaggaagatgactgtcgcgctttgaacatttggttgggcatttacgacgactttaagatacgacgaaaggttcgtcatattagttcctctgtcacaactatcagaccgtgttgttttctaacgaaagaaatagaatgtatgtaaaaccagtgcagcggaagcgtaattaatccacgagatgtcttcactatctcagcatactgctactgcatacgttagatgggccagtgtattctcgcatcgttggatgctagacgtctatcgattttccctcttatttctccatcgcgatgtacatatgctgtttttatttgcgagccagtcatttgaagcatgcatttcaagccaaggtacgtattgtaaaagctgtaacgatactgttctggacatcatactgcatagtatcattgggtcatgcgccgtcccctttaatttaaaggagtatgtcgaatttcgtacagcgtaatttgccactagaccataacaaaaaccaaggtgcttgtttagggcctagaggggccatatcccattcttgacagagtacaatatgtacgtctgcctccgtagcagcctcccatgggttttcgacgatatgagcgtcaaccccccgaatatccattgaccaaatttagaagggttcaacatatgtgaaacatcctgccgccgattatgcacagtagccgggattgtcctgattcatcttttcattttaattaactgataattaaaaatttaataaagtgacattacgcatgaaccaaattatgcgaagcccttgatgaggtggaaactgccgatcttgtaccccaatgggatggatgtaaagatccgctggggttcggcccgcccgcaaatgcattggtaaagtttgtggttcgttacacttactgtacaggtatggtaagacaatttacagcatcacggaattgtacaggtaggcagtattcgtgacatattgcgtgtaagcagattgagactaatttaatgcgtcaacggcagctggaccattgtagtgactgggaatttgtgccactgtagggtcgctatctataatgagcaaagacacaattataaaaaaaaggaaaactctggtaattgtagctcgtaagggttgtatggtgggtcctgtggggaaaggacaatgaaaggcttggcaagggttcagttggcagagaaatactttaacccatatagaacttcctttttgatataaaaaacagtgagtattaaacagagcaataaaggttgagatatacaggaggcaacgtggttgcgttctggtattaaaaattgtcactgagcccgctgtactaaagggctgggtaagcgctaacgtgtatatgcgatataaagaaaaaggctaggaagtcggaaaaaatacaaagtattcgtatagaaatctgggggccaaaggtgcgagactagtccatataagacacgtaagggtacttttgctatgttatgattacacctataaaacgacaaaattagggataatacctacgcgctaatgctatagggattcgaatcccagggtccgagattggatcactacgcgctgggactaatgtgctggacagcctcccctgcttggtattgcaagatgatccagataaaccaacaccggtttaagaagaggtgcgagcctagtgagcgcgactcctagtgcccctccgacttttatcgtctcgttccatgaacccctggccccgaacgctcgtgtctgtcctctatattctgtctgtgatatagacatcagatgcaatatgagaatgtcgacggggatatcctgctcacagatacgtcgaagtcgaatcggcatcatttttctgcttttcgccctcctggatttcagctctgcagactcgcttccatgggtgatgagatggtccccaaaaggatttggaccagatagcccttggaacactgtgttagttgagatgggtagtgggaaagaggagatcgctctgtatctagggggtggaacagctacatcattctttcttcctactgttcaaatcgcacgctaacctcctactgctgtgccgatgatgtcggaaccttcgatactcaatcgagcacttaggacaacacatccattgattatacgccttacagcttgtgggggtctctggatttctcgcaaaccaacgacaatccggtcttcggaaaggctcaccgtgccacaaatgcgatgagcctatatggggcagaaatcccaagttccaatctaatcgctgtccaacaaggctaccagacctaccccggaggacagagttatcatctcgaagttggctccctagcgctgggtgcccaatacatgaaccagacatttggcaacatcggaggcattgcccctggctggttgtgggacgggtcgaaacaaatcgagtcatattcatacggcatgcacattgggtcatactcgctaggtattccgggtagttggatgctcggtggctacgatcaaagtcgggtgctaggtgacgtttatgttcagcctcacaccggcagttcggcgcctatcaatctactcgacgttagcctcgatgtcgtgaccggtggttcgctgtggaattcttctagcaaagaaggcctatttgcacaaggaaacttttctcttttgggggggccaccgtcatagcagccccagtcgatccttgcatttacctgcctcagggttcctgtgacgccattgctgctgaattatcagtgactcacaacgctgatttgggtctttatatctggaataccaacgaccctcaataccagaagatcgtcacttctcccagctatattgcatttactttcaccaaggataacaccaacacacaagacctttgagatcacttgagttgcaacatgctctcgctgttgcatttgaagaggatagctttgacgaaaaaaatctcttagagaataagacatcatctctgtgtgtgcaggcatggttacagctgatgagtaaagcgacgtcgttcaactacgacactacacaaggtatgagttaagaataactgaaccgagttctttcccgatgctcatggccaacttgcgactatatgtatttcctacatgcgccatgaggtacttcaagatgggctcacatcctcgcacagtcagtttaaagactatcttgaacgatttccaccttttgagtactcggccaagaattggggctatcatgcacgcatgtcccactcaaaagtgaaggaacaagtccaagcttttgttcagagcgagaacgccctttctcaatccctctgggtattgtttgccgatcggtaccttcggcgaatcaagcaggggtgctcaatcagagcctctctactatatactgcagcatacttcagccttggagaatgtcttctttactttctcgccaatagtgtctcccgtgatacaaaggacgatgatggccagactgcattacactgggctgccagaaatggacaagtggaagcagctgaactgctattgaagcatggtcttgaagtctacggggccggcaaagaaagaaaaacagccttgcattacgctgctgaccaggatgactcacaattgataaaactccttgtgcaatatagggcaaatattgaatatacagacatcgatggccagacacctcttcttaccgcggtgcagaatgtgaagcttgagctggctcaagaactagttcgtctcggggcctcaataaaagcgatagactctatgcgtcgcagtgcgctacacttatcaaccaaggggggaagtcgcagcattcagatcaccaattttcttttagcgagaggtgcttgttctgagatatgtgacgtgggaaacatgatgccattacattacgccatccgcaagggatctaaagacacagccgaagcctcaattcaagcaggagcatgtgtcaacgctggcatcgcgaggaagagatggaatcgaacaacaaaagctggccgcggggtttatgaaccttcacctggagaccaggatgcccctggaagtaagctcgttcatggcctaactccactgcattgggcagcactcataggccactcggaaatggtcagatatcttctctccaaaggggccgaccgaacaagcgttgccagggtggcgacacaccgttgcaccttgccatacgcgaagatatcattcgggattacggagatacttggaactcacccgaatggcggattgaagttctcagcgacttggttggggctggaagtgaagaggcttaactatatagaaccacgcacgggtacgcacaaagccaagtgcgctaaaccaaaagggtcactaaactacattagtcatccccctcaggtccactttgcccttggttcatatagccaataacatgctcttccttcatccaatatccgatatggtgtagtggctaacatcgccgtctctcacacggcagccgggggttcgattccccctatcggagtttaacttgacatatctttttagatgcggttcgttttgtactggttttttatatattgtacacgcgagaagaaagagaaggcggtgattgtttcatagtcatacaaaagttcttgtcctgcatagttattacatgttgctgatatacaaaagtacgaatccttactactgacagtactccgtacgcataaagacaaactaaaaaaatcctctgacccgggatcgaaccagggacctcaagataacaagttctcttaaagaatagggcaattacagtcttgcgctcttccagctgagctatcagaggggttgatacggtacaattaggtgcctctaaaatccataagtttgaagttgatccccaggttatcggcagtagatcggcaatagatcgggttttgttatcgatcgggattttcttatcggtctccttatcagtaagtatggcggaagcgtccacgttgacatgtgaaactggagatttcagttgaactattttaggtcgttttctatcatttgccatctaatctagattttcccccaaaaggccctcaagttcccatccggtgtcaacttcaactcagtgcacggtgataatggagtacgctattttccccatcccggcatccattcggcgtcgattaccccgcctatactcttcccgagccgtccccgagaccaccgaatcgagcggggatcagcaccgtggacttgcatcttcgtcggaacctcatctgctatgtcaaagccaattgtctgcgtcagtagtacctgagctccaagggccttccatggccagcgatgacttggatttgttcgaccctggccccgtggggtcagatagtctccgagaggacatggggtccccgacaaaatacgaaaccacatctgggctgcggtggaatcgagtcgtacccggtgagtcctctccggttgatgttcgaagtattcattgcatggtttttactgacggttttcgtgaagcattcaatcttctccgaaatgcggggtatgaagcccagcagccgcaggctgatggccgtctggctcgatctctctactttaacgctctcatttaccttcttgatgctttaccctccgacctgaccaatgaggagacctccatgcttcagcaccatatccccgagccggtgaaagtcgagttaacaacatactcccagccgtccgggtatatggaaggtgcgaatcatacaatatgccctccgccaagatcatatttgcataaatttctcgcctcgatgattttgcagttgttcattgtattgcggttccttctaccatatgcaaaggtgctattgcgccaagtatatgagtatgaccggacacatcgcatcactcggcgtatcatgactatcacactggaggcagctgacgggttggggaaaggcggtgttaatattggagctgcggttagcaagttcaacgaagggcggattggcgctgctctcactaatttcgcggtttggtggatggaaggtgtagctggaggcatatatgagggggttggtgaggggatgatacatttgggtctcttgggaaaagaagcggatttagatagacttcctttagagccgatgagtatgtagatagatagatcataggtcatagatggcttatattagattacgtcccaacgagagcaatgaacatattcatggagtatgacatcacatcttgtagcaagctccttagcaatgcccatcaactttatagtgatttgcagcgatgtcgagaacactctaggccgtaatagcatcgaaaccgatgtgtggaatgttggcactgatgatggcaaactatgaggttgatcgagtcacctagcaattcttccagtgattggttatcgccagacttgagtgcttgttccaggtctccgtagagagtggctgtcaaattacgaagacccatagcgctcagggctcgaaactcccttttggggggatttgatgcctgtatgccttattttagcaccgctctcgataactaccgccctatatgaagccttcggcctatacaaatttcggcatcttcatatttttgggtggtttttgagttccaaaaaaatttctactttgagttgactgccggttttctcttcttctttcttctttcttctttctttctccctcggcataaatccgggtaagggaggtggaagggatcaaatcctccgtctccgctggctccgccgaggtgctggagatctagcacgcttgcgacggactggctttggttttgcggctgcgataataacagggtcagccacgaaacaggaatgtaagggtgtgtggattacctcgagggatgcttcgagcggcggccagatcaagcataggtagacggcttcaatgccgagacataaaggaattctaggatttgtgtcacatttgacgcccattttctactattatggtaattcaggtatttaaattttctgccgttctaaaataaggcatccaggaatcaaagcctccccaagaggagtttggaaccctgagcgccatgggtcttcgtagtcaaactatcaactcatatgtacggagtaaaattagggagttactatttatatagggaattgttgctcacacccccggaaaatcggctctagtggtccgaggtctagttggacttctgtgactgatcttgatcttctttcaccgctcatttcccctccattcagccaatcatccatatttcaatattacttccatcaatacctgctctgttcacgatgtgggaaccagtcgctatcccctttcagaactccaagcctctgcctactctacctacaacagatgaaattcgcgcttgcaccaatgttctgtgggagaccatggcctccaagattgtggcggtgaacgacgatattgttgcaaaatatgggggtactgtcaacgcctgggaaggccaagctttggtttaccttgaacgatacgtcccaggagttccggcccctcgactatacgcgatgtactatgagtccaaacaagtcttcatgatcatgcaacgcgttcctggggttccgctgaattccatctggccatcattggtggactctgagaaggacgacattatcgcaaaacttaaactaatatccgacacaatgcgaaaggccgagtgtccatggcccgactttttcggaggcctggacgggggcggcgtacatcactacctattctatagccagcatggcgataaaaaattcctagggcctttctctggcgagcctgccttcgttgcggcccttgtcggtaattatagagccttggtcgaacgcaataagcgtccagacttcaaggctcgcttttacgaaaaacactgggctcgcgtccttcaaggtcaccggcccacattgacacatggggaccttcagcagaagaacattattgtcgcagagaatacaagtcgcccaaacgatcaaggtgggcgatcatttgatgtcgtactggtcgattgggagaattctggctggtttcctgacttctgggaattcttttgtgcatcttccccctttatttttgactggggagaagactggtcctggcgagtccaggagtttcttcaagtatggccagccgaggtggccatgatgcaactgattgacagggatctaggctggtgaagtacgttgctatgtttagaacgaaatcgatgtattcttaaccacaaagaaaaaataaagctcgtcaacttccatctcaatccttcatcagaaggctctggccgtcatctgcgctccgcaaacaggcatccagagtgggtggccccgattcttctgggatgcgatcgtatgaccgcaaaccgaaacaaaccgatacttcaaatttagctatgtaaaatgccttcctgtcgcaacttcggaatcgcaatctgatgtgtccattcattgcactttatgattggccgtcgttgttcgcctggcccgtaaagctccccattctccttcgtccaagtgatcttattccgcttgcttggatcatggctccaaaagtcaatcccctgctgcttggtcggtgtgggcaaggcttctaagataccccttattctcggaaaatcgactttgtaaatccatccaatctctgtggttctgtgaaaatgcgcggacgctccaggagtatagctttctttcacatcgaagtacatgccctttgcggcgatgatgtcgccggtgacatgaaatagatctccttcgaaaatatccgggtctgtttgaatgaagacacctgtgtggtatcgcttcgcagggtccagaggatcgggggctgctgtgtcgaactctggtgtgaagactctgtaccgctcggatgcgggaggattgtcggacatgtttgatatccagataaagacgtgagaaggacgtagcgttgatgggggaaaacagagtatatcaaagtattgagacactggatagtgaaaagatggtggtttcagtcaggagaaaagaaaacaaaagtgaaaacaagttcagtaattacctcctcaaggcaagtactgtaatgggaaggaatgtaggtgatctttctttttagaatgggattcattcttccttttataatgtcttccttctataatgaaagtatacatgacatattttaagtatcatctcgcctcgtctgaaacaaaccaattggacagcaatccccgccaggtctcaaattaggccgagtacctcttccaaagttggcgcccggagtactcctttgtagcctcactttcagctctctgacgctagcgctggacttgcatatgtactatgtccagccatttcccttttatggagccaatcgtcgctcgatttctcctctagttatattctcaaaataatcacactggctttgttcaaatgtgtatttattatcgtgtcgtaatagtttgtaatgctgaattaagcaattggacgacagctgcggagaaaatctacacatgtctactccgtatagcctgcggggtatcggctacgcgccggatgctgtggaacgtgccgtctttccacaattcgcggttttgtttcgccttgaaacattggctggattgaagtggtcaatgacctctaagggcttgccgccagcctgaaaagcgcaaccttggaaagagaatttgttttgtcagtcgatcaaaagtggtcctagatgggcgtcaacgaaaatgttcgacgttgacaccgaaaatagtgtcgcaaccaaaacgtaccctttccaggctgagccgctcattgcgattctgtccaaaataccttgccccggctcatctcccggtatgattagacttccggtgtcaattttattatcacccaggagcagtgggtgagcgttgaggcggcttactggtcaaagatcattggctagcacgtttcccccagggtgagcaactgctggctgcgcccgctgtgctacgaactctgtatggatccctatagaagtgcgctttggtgtttcatggatgcattagcgaaacgcccacgatgttcgagctcgacaccttggcacccgtgaattgccaatcatttttggtagccttatctgatccaagaggaatatacatgccagccgaggaatacatgtcagctaaggaatactcgtgtcagtcgatcagccctgtttgtcgatccgtgaggggtccatcatatgatatgcatgttgacatcggggcctttgggcagatagattccatatagtcgaggacccccattcccaacgaggaagagacactcgcacaacgacaaagtcgctttcaccctcggaggactgacaagcattagtcccagacaatacattcatacatcgtatcttacccggttgacagaccacacactggaatacagtgtacctttacattatctctgcaacttaaataatggtcaataagcatcagttccactaaatattttattggatggacctggcggatggttgcaaacacaaaaaagttcgcttggtctaattgtgtggactcctctggactgcgccaacttgagcggtgaatagatactcaaccctagttcagcctgttgagtcttttcagttgccaaggttgatttgtatctcgggaggatacgtgatctgggctcaaccccataactgatcggtgatggtagaggatttgaataatatcgattgtaccgccaggcccaggcgacggcatggatctaggagtcacggttcgactcgtccgttagacaactgattcaaaaaaagggagacaggagtgtgaaaatgcaattaattgtggtgcacggaaatatagtatcttaaacgggtcaatattattctcgatcttggaacataagcctgacttggagggtgcgtactatcactacaacatcctgttgttgtatgtatgtcttctgctctgcagcgagagaaggaagatagcagggctttacgagtcgatatattctagaatattagacttccaatttacacccgttgttgtatgaggggggcaaatatactgatttgaaggaggcggtggaaaaagcggtaggtagaatcagccaaatcattttatagtcacgattggccgttattctcccccgtatagccaggtgagcgtcaaccccggatcttcccaactccctctgctaaagtagacatgtcgacctccaagttgccctgcataccttcacttcgaaagcagcagctccacctggaattgtgagcctatgtaccccgcgaataccattttatgtattgacacccctacagcgcgagcctgagacgtgcagcaccgccaggggtttacatgagccttgcgcctggggacccgacactttggaatggagtgatatttgttcgctcaggtgaattcaaatttactattccctccgccatgcgtcgattaactcctgtttgtaggtccctatgcttcggccgtcctccgattccagctccgcttcccagacacctatcccgaccttcctcctctagtcaccttcgcgacggacttgttccacccattgattgtgcctcttactacatatacctatagcactggctcggcaagtgacaatcccgtcagtgcgacggacgatgaacgattaccgcccggcggattcagtctgcgccatggattcccccactggtttggtagggcaaaacggaacacatcacggaatgtaagcggtgctagtgcaagtgctgcatcgatcggacgcgcaagctctaccgatccggttacagacgatggtgatgaatcgaacgcgtcaaaccctccagcggcatcagcggctagtgaggacggcgatgtagaagcatcgcgggtggcagaagtacctgctatagatcagttttcggaacgaagagacgttgtccctgtgtccgagatactggattacattcggtcgacctttgatgacgaattggttttggattcgctgccggttgaggttgccgggaaccccggggcatggcatgcatggcaggcacatcgtcgaggaggccctcgaggacaactgaaacgtggaagcccgcaggctcggcttccgggggattggcactgggatggaatttgggccaggcgggtgaaagatgagattgaaaactctcattctgagccgatgctgtttggaggtgctgctcgtgggggtgtggatgaaatggtacatgacccttggcgtcctttcttgacttgtactaaccacattttagattcgattctcgcggctggatgatacaaccatgaactcagtcaaggagaaaatggctgcaatggcaggggacgggatataagtgctattatgatacccaaaatgctactttacgttgtcttaaatcttcatcgacttaatctcggaatatcccacggatcctccgtccaggagccatggaaatgccatcgtcgttgccatctgaatcgtcggtcctcaggaagcggcaggagcatatggcttcaacgttgtttacttccccatttctcctcctcgcatcattatatcccagcaaaatgacctataagctatcatatgatatcaaaagctcagctttaattattgcattgatccttgttcctatcgctgttctcgtctttgttgttgtcgtcgctcttgcgtgttccaattactggagcattcattccctcaaagaatcgttcctgtcgtgcttcagtatttggaagcagcagagacgcaagaagatcccatcggactcagagacttgccccatcacgccccggtcgactctagttcgtgcgacagacgcttcggatattcggattgaattcgagcgtcctgtcaccaacagagagcatatttaaatctcgcgacaccatggaggaaataccaactacgccgatttctgttcttaaacgccgcaccccattcattgcacacatacatagagccagctcgacatctagctctgcttcgagcttgtcatatccacagatcccttctcgccattcgtccctttctgcgagcgtggaatacgattcaagcgagcttgcaacatcaaccagaagcccgtctctcagtgatagtctttacaatattgatgtggttaaaattcgtcaggaacatgctgcagcttcccgaggtatccgcaaggctggctttgatgcgaatgaagacccatttatcgatcaggtaatttccgccatggtttcaagtgcattgtccttactgacctttcccttcagacatcgcgccgccgggttgatcctcgaagaggactcatgactcagagtggatatcaactggcgccacaacttcttgtccgctggagctccgggtcttatggttctatggagccatgtctctcgtcgaagtcagcctccgtttccggcgcaatggaaccgccaacagattccatctcgaaacataaatccagaatggacagttcccggtctttatcaaacatgctgcgcccagggtcatccgggttactttgtccgttggagcttcctgtcgcgttcgccaccatgaggtcctacacaggctggccgtgcatgggcacagattcgatgtctgtgtgggcgtcagtaaatgtatctgctgatgttgagcctatttcgctgcctgagacctcgaccctagcaccccttgacattatcatactttttgatagcttgtgagttgatccgttggtttaatcgtcaagagaaaacatgttttgctgactatcaaataggcgacaatcttctgttagccttttgacgccaatggtcttggcatcttctgtgcttgcttcaaatctggtcagcaatgacagaatagccgtagcatgtgttgacggaagttctaaagacggttttaagctattccttccgctggggttccacccattcgagacattgagagctgccctgaatgaattttctctccgccagttgaagaagaaaacgagaaaagcccctgacgcgagtaactctattcgacaggcatctcgactcttttacccgtctcccagagcagcgttttgtcatctggtattcatatccgcgtttcccccagaaaatctgtttatatctggcgtggacacggctattggtatccatacgatctcccctcagccttgcttccctcttggcacagcaaaccatccacttggatggcacattttctatgatgccaatgcagatgatccacgatcctgcgaagttcatttcatgcgaatggtctccaaagtcattcggcagcttcgtaccggtctcagccccgggatcctatccaacttgaaattgtttgttgagcagggccacggatgccagtttgattcggcaatggaagactgccacctggcgcggttacgaccaggggagacgtggatactcaaagtgaaaattggtgttccgattgagttttatcaggaaacacaattgactgaacatcccgtgttcgaagacttgatcaggcagatcaacagtgttctaaaagcgtattcttctgagccggccgcccagcatgttctaagcgcccacctggagcaccagcactctttgctaccgaaaccccatgctatttgcttggaaactcattgcactatctcgcgcatcccaggtgtgccgccccgtccttctgacgattatcgcaaggtttcagcgctaatgtcgtatgaaatggacgatgatgctatcagtatcagcttgggatcttcaagcgaactcagttgagatcaactgtttgtatttgctcgatggagtcatcacactattcttatggcctaatgcttgatttgctcccgacttgaattatgctttatatttgtatctgtataagaaggctttctcttactcttggagtataagtttcaattggatgcaactcgctatttgactaatgaagaagaactattccttgtgttcaaattcagtactggaactgggtatagtgtagatatgaccacacaaacgtcgcaagtcttcccaatgacggcaaagttcgacagcaggggatatcaaatgcgagggtagacattgcccgccatccgccatgtctctttgattaaatccgcacatttctctccgatgccgtaagccggcatctgggtatgtcctccatgcaatgtaggcatgacactgcaatcagcaactcgcagccccgacacacccctcacctgcaacttctcattgagaacagccatcggatcaccattcttccccatggcacaagtacccgccgcatggtagcctgtcaacaaaagtcagtaaccacaagacgaaccgtccttccaatacagcactcacaagtagtcgcatgctgcttcacatacggaacccactcctccctcgacttataagtatggtgcttcaaattcggcggccaagaccccttaacgatatccttggttccagcaccctgcataacaacctcattcgcaaaccgacaagcctcactaagaaccaacacatcaagcggatcagcgagatagttacaatcgacaatcgggttaaccgacgcatccgccgattcgagcaccaccgagccacgagacttcggcgcgaacagctcggcaatgatggaaaacgcgtgctggttattgatcgggaattggtcgtattgcttgggaccgccgtagcactctgtgctgaagaactcgatgtttggctgctgtggtgtgagacccatagggtcacggccgggttcgcgggaggtgtttttccagagaggctcgtcttgcagtcggtcgtcgaggcgcgcgaaggcgaagctgccgaaggggaaggtggataggaagccggttttgttctctttccactgtgcgtaggttcggtcgaagttgttgccgtggtagacgtggtggtcgtttgttaggccttgcttttcagtttcgtagaacatgaatacgatctagaggtgtggactgttaggatggttcatgttgatatgatcgttagggaatactgacgagatggtccatcaggttcttgcccacgcctggtaggttgaccaaagaaggaatgttgtgctgttctagctctgccttggggccgatgccagatcgaaggaggattgcgggactgcagtaggcgcctgcagagattatgatctcctttcgagcgtagtagatgcgagagccgccatctgaagtttgcgtgactacgcccgaagcgcgagtctcgtttctctgcttactgaagatgattttgtcgacagtggtgtcggtcttgatggtgatattcccacggtggctcttgttggtaacgaaatcagcacccgttgtccgcgtaccctggtatactgtgcgaggtacatggccacatccttgtgcaacatcgccggtgctgaacatgtcatgatgaagaggcatgccttgcgagacataagactccatcaaaagcttggagattggcgccagatcatgcggctctgtgtgaaggggaccggagtgtccgtgactctctttgtcggcctggaaccatggctttgggtgaaatgtctctgactattcgtatttttgttgtcagtgcctgcttattcaatgcggcgtgggaatcatatcacctacttttttcatatactcgaaaaactcttccccactccacccatctagtccccagtcatcataatccagcttgttgccacgaatgcaaagcgtgccattgcacccgctggatcctcctaggaaccggccacgactcagcttcacttggcgattgtcaacccctgccataggaggagtgacgatattccagtctgtctcggcatcgaagttgtttgaccacctaatctgtcagtgatgaggaatgcatcaaggagggctttgcgactcacccgccggtcatgtgaacattctccaggtccttgttatgctgcccagcctccagaagcaacacactgacctcggggttttcagctagacggccagcaaccacacagccagaggttcctcctctaacttatggtaagcaagattgtaagcttctgtgggtggataactatcttacccgcagacaacatagtcataggtatcctcaattccagaagccatggtgtagatttcagatcacgacttcatcaagatggcaaattaaagatcaccaaaatgcatgaaatatgagctcggctttttacaccggacttctgaaataggggaggacggaggcgattccgcatactcgtgggtaacttgggacaatcttacctgtttatgtactaggcagcgacattgggcttggcagaagtacatttaatgcatgatctagtgatagacttgcatcagccggcatatgattggtccaaatcaaaaacctcgggataccccaaagtgtggagtttgcggaatgtccagtccactttccgctcgcggggtatggggtatgggtgaaaagcgggatggttccacatcaaaggttatagaacagtcgattcgcacaccaaaaaagagcccacagggccgttattgtttctatacagcagtctcataacctattgagatgctgagaaattcgataaagcaggggcgtggtccaggatggctttctttccccaaaccggatccccatcatcgtcaaactcagcccactgaaagaacgaacacccttcctttcctggtgcaaaaccagcatagcacatccacatatatctgcctcgtgtctcatgcttgcgttgtgcacaccggagaatcgtatgttcaccacacttacaacgtggagtgtagcgtgggtgtagagtatcacgataccaacgataggtgatattgatacgtctgttaccggatatcggatgtggggagatagcttgagccggggtaatggagtgtttccactcctcttgcatctctgcgtgcataataaggagagaattgtgcggaagatagatcgagatttggccttgggcgtcagcccgtgcagctgatgcagtctggtttcgcgcaaattttgggactggactagtcttatccgcatcttgatcttcttccgcagtctcgtcgtctcgggctactattcggcggactcggaattcgcgtgccacgcccaagctcaagcttcctatcactgggtggggcccaagataggtcagttcgtcagagtgatatcccacgctttcggtcggcccgtcgtagcaattaacgaatgctgcgttgggccgccactcctttggtgactggtactgtaacttctttccgcctggatagatgtctcgaattcgtttgttgatctcgctgttgacattgttctgtacttggcgtgacactaaccgtagctgaggtgttacctggcgcacatttgaccgatatgtgccaccgtatgtgtattctgacgtctgttgccggtgttcttcgggcgtagagacgtacacggcgtgtgtgtggggactctggacggtgcggttgaagagttgaaagtcgtaccgagaaaagtgtttagattcatcaagtaattcaagtagaagtgtatttgcttctttagctggtaggaagttgtggatgatagtacaaggtgtgtaggtggcaatatcctcaggcgagtagaggtgtaacgttttgcccttttgtgggaggggaatgattttcttactcgcacattcattcaaaggtttcatgcttccgtcttcagcttttgtaagaatatgcgatgagagagatgtctgcattccgaatgatgaggtaacagcagctcgctttttgctgacaagtgtgcctgccgtggagcctttctcggagagaagtccagcagcattctccacagacccttcgcaggataccagtatttccaatagctcatcttgtttgatagtcgggaagagagagagcagtattgctagcttggtatcagtggtgtcttcgtggggatctgatgactcgggcttggcctcctcgctcggatttaagagccgcggtcgcttcctggatatgaaagcatccatggatgttcccagtctcatccttttgaggctctgaaaagtaacgaatgggcctcggggtgcttatgacaaatcacgataaaatgcttatcggcacatgatttccaccgaagtgaccaatcagatcacgcacagtatgaggctctccgtagataggtgcaaattgtagatgatctctatagaacgacttttaaactaggtagaatttctgaaattggcgatattggtctgctatgcatggctcagcatgtctactttcatttcgtccaatttgggtgacccatcatgaggttccttcctactatatcgcaagaacagccgcacttgcctttgtgtggtcttaccttggtagatgggatggtacggccaccagcatcggtctcgaactacacattatatacgatatatgcgaaaaaaaatggttgaaactgattgaaagatacactctaatacagactaaatccatttgccctctcccaaatatacctgtccctcccgatgatactcaaccaggggtttcatctgacgaagcccatcaaagatttctaccaatgcatcgagtgccactatcgtccacccatgataatccccctggttttctgtaacgtaactagatacacgttctatatcgtggctcgtgagcgggtgatcatcaatcctcgaatccggaaaattctcctcaacaaccttcacccagcatccacccacatctgcatccctctcggccttcgacgaacgatctaaagcgcatttcaagtgcgagaagactgcatcatcgagcatcaagcatatgcgcagtctgcttgggagctctatttcaggcatcgcgagtgacaccttgaaatcatgaaacacttgtcgaatctcttcctcattcaaatcggcgaacatatctcgcgagttgaaaatcttggaagaatatgtctctgtgagaatttggatttcttcatcggatcctgtcaacgtccggcgcaatgcccggctcacggaatggttgaggtagcgcatgaatacagggaggaggcgcttggattcgggggagtaagaggtgcggtagacgatgggtccccatgagagagtgataaagtcacgctctgggcctgggggcagggatctcaggcctggcaatgcaccgagtcggtagacttcttctttgaggaatagactggccggggatgtatactgcttcggtactggcgtttgcttgtcgcctcccaatttgggtgccatttggctatcgtggattcttgggcttatcatggcagttggattgtatattaagaagagtttatgttcaatcagaatcaagccgagcagactaaaaagcagatcttgaaagaggccaattgtggcgtcatttccatactttgcagattgaggcaaaatattatcgggtggctcaatttgtacctattgaacatgattggcttaaatccgtaccagcgaatagataattgatctagaatggttccttttactgttgcaattggggcttgatgtagctgtagatgtagcccgttgacgtcaacgaccacgaacatcacatactccaccctcaaccatcgacccagcagataagacgagagcgacacaagtgacaacatcaaccatccaggacaatcagctagcaagtatggagatgacacaggtcgcagtagatattattatctcctaatgcaacaacatcctgtaaactttttcattctgtgagtggtgactggtctagcttctcctctgggattctagttcacatgaaggcccctagttaactaaactttctctctgtctggaagataaggctactactaggataccggctttcccaactgcaatactcatataggcagagcagatatctctgtctaagcatccacctttctctatcattatagcttccaaaacatgcactagatgcggtcactcgcgtcctttagagctatttcgctcgcgcgctagcaatcaagaggccgatcagtatcaatcttatcgagatgccaaaaagaaagagcgttctagacctactattgcatcgtcccccccttacactatcacctctggctataaatgccccagtaccagaggcatctctgtcgccagaaccctcattgaaacaatttataggatgtaagcgcaacttacctctagaccagttccagtctacgtttctctcgacagagaccaaacaatgccagagatgccgtgattactacgtggaggcagcaaagcacttactttggatgaaacgactgctcaattcaattgaatttgacgcacaacacgatctaatattgtcatgtgacaataagcagaccattgatctgatgaccaagccaagttcatcatatcagacgaaattacgccacgtggacatcaataaacactagctgcgtgagaaggtaagaaagattcaggacttcaaggtgcttttgggacggaaggtgttttgttaatccgtcggcgatcatatgctgcctcagaaagtgcaactaactctgcttcgaagattaaaaagaatcccgacattcgctgatgtctgacattcgctgagctctcggaactcggattaatacatgttcctctgtgccaagaggcgctaaaaattggcggtcccatctgggcgagattcctagtatgcttcatgtttgcttgctcgtttgcttactcgcttactgttcgcattgtttactttacatggattgtttgctagatagctaagcgagaaagttcaagtttgtaacgtttgcaaagtggtcagctatatcaacttgcttcttctttctttctccatcttggttattgggttgaatatactctttcttcttggtcgatctggcaccttgtatcctgaaggagttcatagaaagaaattacatatgacgccattattgtccgcatcgacagcgtcaaagcccgttctaagtatacgtaataaagtaaattcaggatcatcacgttcaatacctggaatgggcaacagatactaaaatttcctatatcatctaaagcagattctccattgagaaaggcttcaaacaagaatacaaagacgaagacgaaagaatcatcaacaaccaattcattgagattatttttagtatgaaattgctgacatagataataaatcaaaagcgaatgtgcaagtggcgtgcctgaagagccaagaaaggacctcggcccatttgatccccgcaatcccgagatcatacgccaatctcaactcgacatcttcacgagctttgacgtttgtctttttgataccctatagcttgcttgacgatctccttttttctctttctatttctctttcctacctccctccttgggcgaccggcgccaatcagttgctcgtcatgctccattaccgcacacaaggatataacggttgcgccgtcaaatactccccattctttgacaatcgactagccgttgcaagctcctcaaattttggcctagttggcaatggccgccttcatattctagagttgactgcgaatggaatccaaccgctaaaatggtaagtgggatattccagaccccgcggcggagtgtgctacacagaaacctaaccatctggcgctatacaacctctaggtttacgacacaagactccctatatgatctcgcatggtccgaacttcacgagaaccaagtcctcgccgcatccggcgacggcagcatcaaactattcgactgcacagcgaacgacttcccaatctcaaattggaaagagcacgcgcgggaagtattcagcgtcagctggaaccccgtcgcaaaagaccgcttctgctcaagtagctgggacggcacggtccgcatctggtcgccgcatcgcccacagtccctcctcaccctcccaacccacagctgcacctactccgcatcattctgtccgcacagtccagacatcctctcgtgcgtgacatcagactcatacgtgcgcgtgttcgatctccgcacaccggcctccgcttccaaccacctcgtcacccagatccccatccacggcggaccccccgctcctgcaatccccggccagccaggcggccctaccccgcccgccgaggccctcactcacgactggaacaaataccgccccactgtcttagctacggcgggtgttgaccgtgctatcaggacgtttgatatccgggccccgcaacaagggccgcttgccattatgctcgggcatgaatatgctgtgcgaaaagtggcttggtcgccgcatctttctaatgttcttttgagtgctagctacgatatgacttgtcgagtgtggagtgaccggtcggacacgggcccgggcggggatatggatatgatgcgcgctggcccagtgatgggtgcggaactagggcgcatgggtagacataccgagtttgtgacgggtgtggactggtgtctctttggaagtgagggctggtgtgctagtgttggctgggatgagaatctatatgtgtgggatgtgcgagccacgatgtcatagaatttgacaaatcaaccaattatatatctctggcagggtccgaggcttatcatttttttccaatcgaaacggagctatgctatgtaggattttactggacacgtgtgtttaagatatcagattgccagacagcctgctttaaacggagtgcataacttgaaagggatattgatcattttatttcgtattatatgccagagaggctaaagatgcaatgcgtggtgcgatataagaacaaatgcgtcactattgcctattcctcaggcttaagcattaagccttttgttctgaaccctgcagtgactcaatgactccgaatcaagataagaggctcacaatcttgagagaaacatccatgttgggtatttgggagcatttagactcagggccatggtcagtgagccaatatatcgacaacctcccaataattcatgcgcctgaatgcttatgatcaagtgacagacccatctatttgccgcccagtctgccctcgaccttcttgcgctcgctatcccgaagggcagcaacctcttccttggtagcattgacagccgcgtgcacctggttgaatgggttctcctcgctcttctcgaattccttccggcagagatccatacgctggttccggcgcagaccggggttttcctgctcaatctctggcaaacgcctctcctcaaatgcggcatatgcggccttgaatcggcgctccgggtgtcggtcgatcttggatgtgtccttcgaggctagagacagggcatctaatgcgttatcgataccagtggcgctgagagcagattctttcttgctgcctgcaggagcatcatccaactgtgaaagatcgaggccgcgagtcttcttttgtgcggtcttggcgtttgcgcctttggctttggctggttgggaggcttcttcttcggcgagtagggcatcgcgctctgccttcttgcgggcagcctcagctttcttagcctcaacatcctctctgtagattgaaaatgatcagctcggtactcgaggacatgttctccttgagagattgagttcacatacttcttagcactgctcttggatccctttgtccattgcttttcctcctctgaagccttcttctggtcctccgctgccttttttgctgctgcggcttccgctttctgtacggcactatcagcttctatccaaacgatcttatgcttgaggggtgtggcaataatagcgggggcggggttcagaaaaaacatacacgagcgtttccggcgaccttcttggtgttctcgcctgctgctttcttgcctgccatagtgaaatattaggtccaaactatacgccggacagatcgagcaatggatatgaaaagaaaacggtggaatcgagcttcgactataacttacatgatctgatctgcggaaccaatatgccgattccgatgaaggcggtgactagtccgtgcgtcaatgttggtgccttatgaatgtggcaactgtcgaagtttccccgacatttgtaatctcctatctcacctaggcagcttgaagctgtctgtcttcttccggccatttgtgctatggccctgatatggttcttatgattgataattgtggcctttgacttgatttatactttgtcgctgttgatttcatttaccgattaagcagcgtcctcctccctactagtatgacctgatcgtccgtcacaatggctttgctcttccgctttctacaggcgttcgccttgctgctccttgccagcgcagttgtcgctgaacacacctctaattgggcggtacttgtatctacctctcgcttctggttcaactaccgccacctcgccaatgtcctatcactataccgaaccgtcaaacggctcggaattcccgattcacagatcatcctcatgctccccgatgacatggcttgcaatccccgaaacgctttccccggcaccgtttacagtaacgcagaccgcgccgtcgacctatacggtgacaatatcgaagtggactacagggggtacgaagtgaccgtggagaacttcatccgactcttgaccgaccgcctcgacgaagatgtgccgcgcagcaaacgcctgggatctgacgccggcagcaatgtgttagtatacatgaccggacatggaggcgaccagttcctaaagttccaggacgccgaagagataggcgcgtgggatcttgcagacgcgtttggacagatgtgggagaagaagcgctatcatgagctgctgttcatgatcgacacttgccaggccaatacgatgtacacccatttttactcgcctaacatcgtggcgacaggctccagcgagatcgaccaatcttcctattcccaccatgcggacaacgacgtcggcgtcgctgtcattgatcgctggacatactatgttctcgaattcctcgagacacaagtgacaagtgtcacttctaaactcaacctgggagatctgttcgattcctatgatgagtcgaagatccactctcagccaggtgtccggtgggatttgttccctggaggcgagcaagaaggccgtctgcggactgtggttgacttcttcggcaatgtgcagaatgtggaagtcgagaatgcaaacgccacagagcctggctccctcaaggaagatttggctgagattgcgcgacttgtggagaagtggcaaaatcgtgacgaggaatattcagccatgctagctgattccgctacaaatgtcactgaagacctgcattcatcgtctctacatctgaagctgaagagcactgttgggccaaccaaaatggcggaagacagcagctggggcaagcggctagttggcatctctgtcgtcggtgcatgcaccgctatctgggtggctggatcgtttctcggccgctcgtctgtttaatattatgcaaaaaagcatctggttttctttcctttggctgcaatcttgagttttcttcccggactcacggattcatggttataatgtcttcgttggaatagttttggggaatatagcatattcatggcgaaaggcgttacctccgcgattattgaatttgaagatatcctctgatgagaaacaaccatgcctttcagacacttaaccaaagtaataatcctagtaaagatgcaaccaatatatcgcaaagttttcgatacatgtcactccgggcagtgatgttgttcgaatctgattacacggcttcattccttggtcattttgagaatataaagtgtacaaggagttgacgaacccacacccggccaatatgaaaatttccagacttgggtttccgaatgtattctcacatcacttgctctaacgtacgatgactcactctccatagagcagagcaatttgaaaataattgcggagcgaagcgaagcaattacaaatcagaaggtcgtacgtacgtgtcacgtggccaagttttctcctagggggagaaataatagcgttttaatgcagcgtcaggtgaccaggtaaggtcacgtggccaagtttctcctaggggagctgaattatgacttatgacaaaagcaggggagttgatctagccgaggggttgctgtgaagccggtgggctttgcgcagcattagaagttagaattagccgctttgctctgcaacgactatctcgtaggccggtgagatcactcgtaatatcagaattattagaggagcgacggactggcacgtcatacttaaccagctctttccacaacacaacactcaacccaactcatctgtcacaacactcaacccaactcatctgtcagtacacgcaatcatcatgaatccacggcgtgagggtcaaagcagcgatgaatcggcgacatcggaagccctgtccatcgcgcagaacgccagaatttctcaacagttcttagcaacaaacctcggactcctgacggattcggcaattctccaacgaactcttagcttgaattctgtcatttcgacgacctcttccttcagcatccgttttcagaatgcacgttctcgccccgacttacaaaccctcaaccaaatcggagctggcttgcagggagctgtatttgagcaggtcggcaagcctctagtactaaagaaggaatttcctggaaacgaagacctgccatcgaacctcgatcatgagtataggatccactgtactgtttcggctacattcgagtattaccattccctcaacagcgaagtccacgttccaaaaccttacaactttatcttcaaagaagagaataatgctttctgggatgagatcttaccaaaaatccctcaggcctatcgtatacgtggagaccttatgatgatggaacggattcttccgttaccgaaagtcgtgcgaagggccttaatctcccagttttatactcctcaatacctcaataatactgggattgaggctatcctcaatcaccctggaaataagcactgccttgcccgtgtctatcttggtaaggcaaatggtaccattgatcaggagactccgctacgaaatttccctctgtaccttgagccgatggagcagattggcatcgagactctcccgcttgcaaatgcgatggggaaagcctatgcaaccctacattgggccgccgccatcaacggtgatgatgtggagtttgttcttggaacgtcagccatagctcccgagggaagataccatgaacccgactttcagcaccgcgccgttcagttatatctcttggatttcggacaatgtgagacggtagacctcacccaggaccccgatattgtctatcaagctttcaagggagctatggtgacaggggacaatcagcgtttcatcccgcattacttgaagagcccggaactgttcgcaatattccgaaaaggatacactgaagcgggcaatagaattctattagataagcggttggaagacaagttcaacatggaggacttcatgcagcagtatgaggagtatgctgaggacttcctgtactagcttcgttgcaatgactggggagctgatagctaaacttgctttaccagaatgaggagaatatctttatcaaaaatacatttaaggatgtgaggtgccagattgatcttgaagaagaaagagtacattcaactaaataacgaagatgaagacgcaagttgcaaggtgcgaagcagcctgttgatatagccatagtcgtcgttgcttaagctagtgaaattcttacacattaactacgtagctagttggcttaataaattgctgtttattgaacgtattgcggagcggtatcccaggctgagctgggaacacaggaattaagcacatctcgcatgatcacatagttcacattaattcgcaggcatttgggagcctgaaatgactcagtcgatctccttccagcctatggcaatggcgtgtgcaagaagtcatcatcgctgtcgtcttccacgggcacatcctccaccggcttgaactggatcattatgtccaacatgatcgcctttcggtcgctgccgatgaccggcacccagttacactctcttatcgaatcgcttcccggagcgtgcatcatcggaaggatctggccggttttcatgtcttcgaagtcgaaggacatcagacactgtgtgtaacggtaatgatgtacttgtctcacaaaggggcctgagacaattctcatatggtcatcaagcctgtacttgcggaggcagcaggaacgaaccccagtcgatacctgcaagcaggtcttccacgtatcataatcgacaaagtccacaatcctgtcgtacagctccagcgggagaatgcctgctaatttggatgctgcgcggcggctcgaggcaacttcgaagaagttgacaagtgccgcgagcccagggaaatggcgttgtagtcttcggattgtccccttgcagtctgagttcaccgtgcgtttaccatcccgattctgagcctccattccaggcttcagctctggtcgctggcgcggatgtgtgctcgcgcaagcatctacacgcagaggcgagagcttgacagctttgctggctttggcgaatggccccgcctcaccatcaaaggagacttctgcaaatgccacttcaaagagggataagatgacaatctggaagttggtgtgtccgcgctcgacaccccaggcaacggcctttgagatggaatcaccgtcaaccaccagtgcaagactgacaagcacgtcctccacccagtagatcgtctccatgggcgatgcccctggaggctcgcctggtcgatgagctggggagccgaactccagtaacggagcgctatcgccaacccactcttcgtcaacccatccaggtaatctgtgtaagtggctcgacttgcaggtccatctctggcatgttcgagggttacactcctgaacggggaaagaatggaatttggtctggccagacgcaattgacacgagagcaaaagtcaactcgcgaaaagggaaggagctcgggctccactcctttccaaacgtaataatctgcgtctcgtattgactgatagtatcggctagaacttgtgtgacaaacgccttcggtgcctccgcgatgtcggtcctcggggatacaatgcggaagtcatatttgatgtcccatgttggctcgggatactctaaagccggtgaggccatgtgctcttcgggacagatttcaggcgagatggtggactcgtaccgatagatgctgcctacaatggcacgaagccataggtcgtcctgacgcgggacattccccagcttccaatgtatggtgtggttcatagtgaggacttcatgatcgaggttgatgatgtagatgtactcggcccagttattcagctctgggaagtcggaaggaagcgactcaaactcctcaaactgcgaatagtcgggtttgacgccgtcacggatctcatagacatctctatcgagaacactttccttggccgcatactgggctcgcatcgactcaagccatcctgcaggcattagtatagtgtaaagcaagatctttattcgcgccgtactgttgtatttctcagggtccgttgggatgctcgcgactatcttagcgccgagaccctcaaagtaactgtcgaaacgatgccagcgaatgtagtaacgcccgcgaaagcgtactatctcaagacctcgtgtgcccattgctgtagctggaaatttgattcttagctctcgttgacagaaacaaaaagagctatagttaccaagtgggtggagacggtgggataatcactgtgggtcacgacgggaagaccctcagggcttgacccacggggttgacaggatcatcaaacaagacaaacacaagcatgtgactgggtttagcgaggttggttcattgattgatctttacaagcttcaatgttggaactctagttccaagtacatatgcattaagtagtctcaagcgcttgatgggtgtatcagaggaagcaggtctccatcatttcatcttccgcataactatcaacatcagatggtctgtaccttcttcaatgtctcctttaccgtctcccgatgatggttcctgaaaagggctgtgtggtatgttatgcctggctagttctttgccatcactgaccatgtcaaagggagtcttttaggtctcattatcgtcatttgtcgcttcttttcttggtatgagagatatttccgtggtaaaagccgctgttgcatgtcaaatcgtggtcaacacatgaacaacatgatcttctgaatcatctttggctttggcttcgaagagcctcgccgataatgaccgatatctcgagcggagttaaaaagacgctccatacctgcttctgtggctgtaattgacatgatatctcgtgcaaggctcgcaggtactgagaagttactgctaaccgtcatctcgatattcaatcatacatcatgtctttaacagacacaacgttgagtggccgttcaattggcaacaatttgacaaccgccggcgaagttagaaagtccttgatcaactcaaggaatgtatatcgactacattgacaaggcagcctctggctcaatacacgccttctccgtttcgacatgctactaggagaagtgcaagcactggaacaggggtttaatatcgataattgatctgaccgccgagagatcctccgttcctagagagacggtaggaaacatgattcgaacaaaggattttcgcgtgagactcaatttaagagtatagaaaaatctagcgtaaagcacccaatttgcaaagcatcgcgcaataagatgaaccaacatattctgtgaaaatactcatattaaattcaaggagttgaggagtaagacatttaaatagtgaaatattccgataataaaagaatgggagcaaatatcgtcgaggtgatgaagaggtatggaatcccggcacgtgcctccgacgcgtcgcgcttgtccacttccccggcgctatgagagactctttgctgcaagggcttcaccccaaataaccacctcacatttctgggcttattcttacgagttctctttcttcatgagctgtcgcatgagcatatgataatcccaagctggccatgtatctcccacggcagctcatctcacacctctacctacaactcctccgatctcaccacccgctttctccacccgtcctgattctcgtggcattagagccagacgcgctatgtgcctgtcgaattctcacttctttgttgaaacgcgactatatcccccataaaatccaaccagttgcaggatatggcgaccttgcgcgtgcgggggaggagatggtccgcccaatgcagactaccaatgggggcagcggaggagttgtggtatgcctcggggtagggggactggtagatctggccgagatacttgcgttgagcaatcctgaggacgaggtggaagatatgggaggcgtggaaatctgggtattcgacgcgcgacggccgtggaacctgggaaacgtgtttggtggacaaacggggataggccagcacatgactgaaattgatgtcaattcgcgactgcgaggacgcggggttgacaaagggtgcataacttccgcttacacgtcgaagaatggtggcattatcgtgtatgacgacggagacatcgaggaagagcttcgcaacgaacgagaggcatactacgcgttactagaaatgccagaggttgacgaagacgacgatgatgcgagtgacgacggatctgaagacgaaacgcaaacagggtcaaaaaagcgcaaatcctggtcaggtcgcgaagacgatgaagattcagaaggcgatgagccgcctcaccaacggaggagaagcaattcagtaggttttaacatttttatgatccgacaatggactaatgcgtgatatagggctcctttattgactcgtctcccactcgccgcaaaaagactggaatcaattcttcgaactcgtcacgatctgtgacaccgacaactgactcgccatcaccagctgaggcaaaacaaccctcggcgcggtcattaaagaaacgtctaattaatctcaagcgaagacacgactccgttctacaagcctactattcgtctggaacttcatactccgaaccgatttcatccctgatctactctctggcatctgagcttggacgagatgacaatgacctgttgtggcttgctattgtcggtgtctccagtctagaactcagcggtcggacaatgaccggagtgggtatttcaaacacatcagaatcaggaggctcagcaggctggggtggccaacgtggtgaacacatccgtcaaatacttcgcgatgaggtgcaccgtttgaacccgcctgatcctttagaattcaaccgtgacattcgaggagagatcaacggtgtcattccaacaaccgctagatcacccaccgatacgtcgattcgtctttctcctgaaccccgattccttcttgtcaggcactggtcactatacgagagtatgctgcacagtccctatcttgcgccaaggctgcatgtatggactgagaatggccgcaaacgactgcacaaacttctggccaagatgggaattagtctgacccagtgtcaccaatactatacccacatggacatggaattgaagcgtgtactacgatcacggctgctcaagtacgcccctatgtatggcttagacggactcgtaccatcagcgggatctaccagtgcgagtgcccgtgagggctggggatttgtgcgttgctggggctggaaggcttgcctctctgccacagacgtaggtgttattgtgggtgcgatgctggaagttgggccacatgagactttggcttcctgggacgccaaacgtctgccacgagtgcgtgatgatgcagagaacagtggaatcacaggcgcatctgacttggccagtctgctgcctcggttctggagtgcctatgatgcgctttcactaacatccgaatcacccacgattcttctagagtctctgcccctcgcccaacacctacaccgtgctatccttcgcaccggtacctccctgctctctaaacatcaaatccgtcaccttcgagcattccgcattgctgtggttaaggatggacccgacgtcaaactcttcaccaaccctggggccttgacgaaattggccctgtggatcgccgaggccattcgagtccaagaaaaagagcggggggactcaatcaagatcggtcgcaagagggcagcgggaactcctctcgtccttgctggtctcgacgaagatcgcgatctctatgtcgtcgttggtactggtggcggcggcggcgttgttgacttcgctgccatgtccaagcgccaagaggaacgcaagaagaagaaggaagataaggagaagaaacagaaagagcgatcagagcgccggtccaagcgagcaacagagcgtgccgagcgagaagacgagactggtgccgaagactcagattcagaggaatctgagtcttcatcggaatcggagtccgaggacgaggaagatccgcgtggaaagaagcatcttctccgcaaccggtttggcattgccttccaggaggtagtccaggagacgaacgcccgtgtgcgaatcgacagcttcgagcattgtgttgtcgaggtccagaaggatgaccttggcggcttcctcgaagcattgagtttccgcagtgtggtaggctaaataccctctacgatcaatcacgcagtctacgacctgtcatctttgtttactttcttcgatgcatggggtgggagggatatatgggaggggatactggactttgaaaccggctacatgcataatgaccgttgcatgggtttccacgcttgcgagcattcaaacgcccttcattcttgcatctgtttccaatggcgtttatggtgtttcttgttccgtgaggaaaacatgtctgattctatctagtccatagttgcatcgaatctatgtattttcgaccttccgagagctgattattggatgcttctcatatagaataatcgagttattgcaatacttggaataatacatacaatttgctggtgtcaggttcgtaataatagcgtatcatctgacaccgttcgcaaagtaggagcacatcaatctcattccgagacatcacatcatcgtggttctttcacagagctgttcttttacccccaccagaagttcacgctaatcccagccctcagcccacgcacatagtgccaccacccaacaggaatgtagagacactcgccttccttaagaacagtctccacataatcggcgtccatgaacccaggccacatctcctcccatttctcatattcaacaggggaagtctcgatagccgccaggtccaccttggaagtgttggacatgtcaaccgatctacgagtggttggcagagccccggatacaggatctggctctgccgtctcatcaatagacgtgacccattcttggccccgtgggtggatctgagagtcaggcgtgtgtggcgagtacagccggatgtacttggtgcccacgacctgcgcgaggatattgtggtgggggtcgtggtggagaggggagatcgtccacaccggtccgatccaggtgttgataattgggtcgctggggacacccatgagcgagcctgcatctgagttgtgttcgtctatgacatgctcccttggtgctgtgtccaactgggggccatgcgaggtttcaggaacctgtgcttgaactttagcctcacgctctcgctgtttcttctcatacactggtgttcccggatctggacctggtggagtgatatagcagtagtctggtacactgatgtcgttacgcaaggcggggatttgagtaagtagatcgtgttgtgccatgtatgctgtctccccatcgaggttagtgacctggggctggttttccggcgcctcagccggagctaattttccttgccatatgtacttgtccacaaactctttgaatggcatgatcttctgtccccagtcctcgtcggtatacgaccttcccacctcaacggggaccaatcggcgacccccaaacgtgcggtcccaccagtagttgcgcgacgaccatggacgcgtcgaaatggctggccagtgttcaattgcatcttgtatcaccagtggggtgcggttgttttgaatgtgatgttcgatggaatcgaatgagggcgccgatatacgcgggatcggatggtccagatggggttcacggatcgcatttggagggaagagaggcggcgagaattttctgcgtttcgcaattggatactccggaccatcagtttcgtcgtattcgaatttatgggattccgtagctgcctgcagcgtggacaatagggattcgaccagcttctcgcggaggggggctccagacatgatcaggacgttatccaggatcgccacgacatctgatagccatggcgtgtcgggggagagcttcggctcagttgcattctttatgtcttgaatgagttgtgagacaactaggtgctggttttcaatggagatcaggccgcattttgtgatgatgatgacgcaggccttgacgatagacgcgtccgtgtagagtcgatgccagcagatgtgcacatccttgaatggaaaggagtgcagttttgagttggcgagctcaaatgctttctcagtgtcgttgaagagaagatcttgaagttcagggttgtcgcattggagaattgggtcgtcagagctcggcttggcgataacggacaacgcgtcactgaggactgataaaagggccatgactgagggggaggtgcaggagaaagcgagaacggaaggaaagaaagaggtgagctagaaattatccccaatgtcctccctaagtgtccccaaggtatggtgttgtggtggattcgagttcctcctaccgcgttcaaaatatatcccagaccctcatttgggcagtcaaatggagaaagaaatgaataccctattttttctatgtcatttaatacattagagctaggaggttgcctagataggatgaaactaaacccaggcatatgagagcttagattgcagagggatgttgaaggtatattgattttattatatagtacattttgttcaagatcaagggagttttctaatatacacgctttattcgagaagctccatcaccagtttaggaattcgagacaccccttcgcctcttttggcactgaccggaacaacacacactttctccttccaagcgcgttcatgacccgaggggtgctcaatcgagccattctgaacaccagacaagtactcctgcagagctcggaattggtcttgtgtgttttccaggtctgccttggttgccacgacaaaccaaggcttcaaatgcagaggtgtcatcaccagcggaggcagcgagccgtcggggttggtattcaagatgggggcgggctctcggtcaagtatctgtcgccgatggccaccatcctcagtttcattgaatggattccattcaatgatgtcgtcttcctcagattcgggatctgcatcgcgcattcgctcgtactctccaagttcgcgccacagtttctggagttcctctacaggatcgccgttgctgagatcaaccacaaaggcaagaatcccagctcggtcgatgtgccgaaggaaccccagcccaagtcctcggtcgagatgggcgccttccaccagacccggaatgtccgcaatagtgaagtgtgtgcgacggaccttcgactcaacaagaggacgacccttcatgtcgtcggtgatcacagtaccaatactgggggaaagtgtcgtgaactcccagtttccaatgcgagtccgactgttggtcaacgagcgaaggagcgtactcttgccggcgtttggtttcccaaccaatccgacatctgcaaggagcttgagctcaaagtcgagttccaacatcattccaccttcacctcgacttgcgaactttggtcgtcccattacgcgtgtggagaagtgcggattgcccagcccgccaataccaccggcagccagaagcatgggtttatccataggttttgaaagatccagccaaatcggtgccttgggttccatggctgctatattctgtcgtcgcgggtatgatttcggaaattggaccataagaaaatcagacggctttgcggcggggtgtagtacccagcgatcgtgctggatagggttgaactcgtcctcttctgtttcttcaaacccttcaccttcgccttcatcttcaccttcaatttcagaatcactaggagcccgccacacctttttctcctctttagcaatataggccgcttcttctgcggccttgatgcgcgcccactccacctcgaccggatcataacggctcacctcccgcaccacggtgccgacaggcacctgaaggaggacgtcatcgcctcgttttccacccttacttttaccctgtccgtttcgtcctctgctagctctgataatgcctctgcgggccagcttgtgaagactagtcaagccctcgacagtctggatgtagataccgcctccgctgccaccgtcgccgccgttcggaggtccctcttcgacgtatttctcgcgcaggtaggcgacacagccatgtccaccagatccagcatgtattttcacccggcatttgtcttggaaaatgaaccgcgaataatcctccggagaaggatccagatgcgacaggtctggttttacctcgtcagatacggcattttggctaggctgaggtggtgtttcggggtcggccttggtgctctgaaatcggttccgtgcgacgcaaggtttttgaaggtctcgtaggaataatcggctgcaacgggcttgtcttggaaggaatggtcgtatgggaagggaaaaatagactcgtgcatgcgccatgatgtgtgattggcggctatttctcgctcattctgtgaatgcagttcttgcaacttttgaaatagttcaagtcaagattagatcttcatagggcgcagatataccggttttctgtgaattgtcaacagagtgagttatgacttcagcggatttctcaatgtcccgataagatcacatgatgataagccatttatagtctccccaatgggtgcagaatatatggccataccttaaagttactcctttttaatccaattttcccatttttgcgaatccaaaaagggctgtgtaaataacatgccgctgatcagactcgatattcagaaggatttgccaaggaaaaacgagctgttcaaaacaatgcccaactctgcatctaaccgttcgcttgccacctcatcaacccatattatgagaagccgtcgggtttccacatctgatccgtagggtcaaaacaagtacagagtactttgctgcatctgcaagttgccgctgtgactccccgatctcgtgagaaagtgaccaataaacagatgcggattttacttgaatagactagctcaattttaatcctgtctgattgcgactcgactctttgtctagctttccctaatgttgagtcgctgacatgcagcggaggagagtaaaatacgtaacggtctgttgcctttgtttggtttaatactgtactgttatttgctttttcaacctgctgagattaggaagatagcagcttatgttggcggagaaccttgggaactatcaatgcatccatagatcactagcatgaccattactcaggggctgatcatcaactttgacgttatgacgacttgacttctcctatatttcacagccggctcaaattaatacacgaaagctttcgcaacagtcacaagtgggagaacccaaggcgcagcactctagtccggacggaatcaacaaggatatagatgcttctgattatgtccttgtctcggctagctgaactctttggttttgtttttgtgttcttaccaggcgtgttttacatggattcggtgtatccttgtttttattggatgtgtttaccttgctccaactgtccggtgctccttttttttttgagagtttctttctgatagctttatacaaatcagtgcctaatattgactggaatggggattacccttatacacaattcctcgggtatattatctgctcggggaatggctttctatcaattagttttcatcgaacttgactaaacaattatatgatctaggacggctctaaaatatattttgaattgccctaagaatgtactaacacaccgatttcatgttgccttggtctatatcgacataattattacactcaagcaagcacatacccgagtctacaatgtctttattcatgcgggaaaactcatgcaattaagtgaaaagtaggcggaaggcgagatacatggacgtacgtatatcatgcgcaacgtcggtagataacagtatgtagtactcgaaaatggcaagcgacataaattaagacataggcagatcgataataacaaactatgcagcggagagagattatgagagatgatttggaatttgagatttgagattaaagccaattccaaaacgggataggatcacacctctgcagtatcaagtacccgtgtagtggatatatcatagaggctgcattctcggtgttgaaaggtccgatggccctagctctaatgtcaattttagcacaggcaggaatctgtgacccgctgtcacatttatagcgtgattatggcaactgcagaagcgggaatcgtgttcaacagtgagatcaatcaacctatgagcaagagtgaacttattgtgaagagcggtctctggcattttctaggtttcttccactcaggggcgtgaaattcgctatatggcatgatccgagagatatgaagtgaaaataaagatatgggcatcagacgaaaacttgcccacagtactgtgcataagaagattccacaatttttcgaccaatcagagtaccatcaccatactctcaggagcaagagagggaagctgacagactagagagacgccagggaaagaacccaccagaaccgagcctcaaggcgatcagatcttggctccggggcgagcaaaagtactacatggggaagtctgctgtacttttgctaagaggtttagcactaagatcatgcgtctgtacggagccgttcgtatctggactctatctagatatgatcggtggcggtaatttttaggggttcgtccaattcggtaaactttacgagtatacgaagtagtctttggtactaattgatattgtattgaatgatctttgaggaattgtcttttagtactccgtagttagttaactacttaactatatgtcacgatatatgcatggacaacttgtttttatagacctgtgacctgtgaggctatgtattgtaccaccctctaggtatcattctgctgtttgcgtgggctaattatttgtatgaaatttctctggagtaatattcagatggctgagcaatcgaagtattaaactcccagctcgtcaaggacgcgcaagcggcgactaggtttgtgtattggctacttgggaaataatgatacgcaattcaaaaggagttattgctcgaagtctagatccaataaccagattttcatttaactagtatcaggtaggacgacaagttctgctcacggtagttatcgtatgttggccaagctataaatgggttgaaggtgggatgttggataatcgacaagataccaggcaggtgatcttgagtgataccattgagcttcaattggtttccagtaagaccacacgtgactgcaatgaactcaacattctgtgcctagactcctgcaggggaatcgatctcgatcacatcgcaaagtctagagtacatgaagtaaggcgggaagtacgtaagaagtgtatagatccagctgaccaaaagtccacggaattcagctccccggtaccttgcggggcaaaaagaaatcaataaaaaacgggaagaagaacaggaatgttcgcgagtagaatcgatagtgtgaaaatccttgcgaaaatacggagtacgagatgtgattcggatccactcgcggaacttttgcactgtacccgtcaccgcggcaccggatccctgctttccgcttgccacaagtgcggatgagggcgatcgttcctgttggtcacggaaatagaaaaaaaaagagaaaaaaagagatcggatggtaatatgggtacttcttacaataccaatccattctttacattagcccctctttgggaggaacctcgggagacactaatgtactccatatatccttaacttagtagtaccgtggaactggatctgtaagttccatggtttgtctagcggggaccccgaggtggaaggcgatttggagattttattggaccgcggacatcccgctcagctgccggaccagaggattcagctttcctcgggacgcacctctggaatgaaaaaccttggaagacacgcaaggcagctgggcaatcttaatctccaaggctaggttccgatcttgcctgtcagaattcgtacgtatgcatcatgcatgggttcggatacgccttgccggttcacaaaagtacacctgtcacttatactccatgcagctcctcgacaacctttagaaattagaatttcaatcttccccaaacttccgagatctaaagctaagccataaatctagatcggaaatgcagatgtggggtttagctggtacgaccagtccaaacaattaagttgaagattcagctatccatgatatattgtagtctatagtacgttgtacgtatacactcttcaaccctaccaagtaaggtcccactagtgtctagaatcaagggtagccgacatggataccgatctctagaaagagacagctaaacaaaccgtgtaaccgatcgccgcaaggttctggatcgggagtcgaggaagtaaatcgcattgaagcaattaaactcaaaccttcttgctcggtcgatcgggtagactgcatgaagctatgagttcccgtctcaaatgcatatacgtatgtactccatactccatactccatatattgtacggagtactccgtacacatcccaaggacggcacgaccggtggcggcttattaaaatagcaaggaataggaatggagcctgttttgctcggagttaaaccggcatgtatccgaatctacgtagcgggatcacacctctgaaaacaatgggattagactgatctgcaatgtatgttgtacatcgcctacattgatatgtatacacccttgtacaacatcgggagggatatgttggaatccttgtttttgcccgtcagcatagtgtgtagccccttttccatcgaatttgccatcgaagatctagactttgaatgacggaatccggcccacgggagtgactccaaaagttgatacatcacacaactgagttttcttcctcatcgcgggacagaaagggaagccgcacccagcaattttgccggagatctccgccaaatttgggacaggtccaaaatgaagccttcctatatgccggaagaagtttccattttgccggaattatttttcttctttgattggtttgtttgtttggggtttgagggggggcaatcggcgccacgcttcagccgttcgggaatctcgcgactgtcagaacccgacaatttggtgcggcgttctgtgtggatcatggacccttctgtctagattgggattgtttagcgtctgcaaaaaatttgtcacaaccgactgatctatccgaaaacggggctgtattcttaggggcatcgtatctcgccaaatgctacggagtactccgtataggttcgtggtaatcagatccgtggggcggcgccgacaagccccggtcatcgttgctgtggcggtcctcagggcgggactgtacgatcgatctaggtgtcgtggctgtgcaatagacgaggtatagtttgatagtgtgccgtggaggttgaatccacccccttgctattggtctcgatcgggaagtgttgaggtattattccgctgtgatgcaatatcttgctcactttggaatgaaggaaatatcaagggcaacagatggaatgtggtgaagatggttcatgacctcatgtgaaattaagcacggatcgaccccgacatcgcagtacatatgtacgttcggtcgaagctgtgaccaagtactagtagggcacggcgagatctcggcaaatctactctacggcgttatcaacatcatcctggataagtcggtgtcgtcaagcatggcttccaactgtgcgtgttgacttgtaacgcttcaccgtctttttcgaggcttcttgatttcgagtcaaaacgacgcggaggtctggatatcaatatgggctacatgcgcaatgtcggtccatatcgcaatcctcgacgatcatagttggacagtttaccggcggtgcagactcaaatggcggggcagaacaatacccatgtagggctcagcctaccacgggatcacaggaacgagtacggagtatccgagggagaattcaaggcaagacgtcaaagcatctctgcagataatcaacaggatgcagccaagagacacaccgcttgacaccggttaatatcagaccttgtcaatgcagactcacttgatctatgtccccctctctttccaaattggcgagaatcggaagaataaccttgcaggggttccttttcccccaccttacatggatgattcggttggctgcagggtaggaaaatcaaagactcacatgatctccatcccgatttgaatcgcaatatgtatgaaacaaagagaacagcaagcactaatttccgaccgttgggtcgcaattcttcttccgaacagtccgaatggatttcgaggtagacacgactgtcgctgacggagctacggcaggcacagtcgcgtgatgcatggcatggaaagatgacgggctttgtttcctgaatagcagtcaccgctatatccgcgttgaaataggtcgggctctgttagggttgggttgcgactcgcggactggacatttcaacgatttagttgcaagcgctcccaccttgtagccaatgacctctctggataggaatgcatgcattgggatcgacatatctgggtatttcatgcatagacggattggtcaaacaccctgtcagacctcactaggagcttgtattagcccattgtcagctgggcacggtcacctctgctttctaatcgaatgactctttttattgagcaatatcaccggcattctgtatgactggttgttgaaaaaaagtcaagagaagtgttgcatgttgcaggagccgccccagtcgggtttacaatgtcttgctcacaccgttccttgactttcctcctttggcatctcctacaaggcgcacccctgagaggctctagccgctaatacttgagtatgacgttgtagtttatttatttttttttcctttcgagttagatgatttctcaccggctttttatccactccctcgcgtggccccagataatttctgtcgtacagcaagaatcgaactagcgcatctcgtttctcccactatattatactccatatatcaagtacatatgcacctccaacagacaacatatattcgaatacaaatggtcccacttattcccaaccccttgggtcttatgcaggcccttcttgttgggtcggcactgtaccgactttggatagatcccatttgtgtcaacagatcgaaagtcaaaaggaccggagtaatagatagccagaatgtaccagcggaattacggttcagtaatccgctccacttcgccacaatggctgatatagttataagggggagaaaggggcggcattgttttcccctgttgccgatcgacgcctaacggccaatagatggggctcgggagtgtcggtgaatttctgacaagctcagctgattctccggaggcttctcgaaggtctcagaagccgtaatccacattacagtggctacggacgagattatttctactagtacggtgtgtatattgtaattcgacgccaagatgatcatcggatctccgagggtttcaatagcttctctttctatactgcttccaactccataggctccatctgtaccgggatggcgggattcgcgagaaacgctctggggagttgaaaacggcttttactgcggacatgcaacaatgcgacaatagacggcacggcgctcgagatgggctagagtttccctttcagctggtacattcgtacaccgcattttattcctagtatatcctaaacatggttgacctacatgtatgtttcgacccaatcagctggttccgaccttattagaaaagtacgcttctcctgatcatcccggccatctgggaagagtggataacatgttaggtttccgttgagtggagagtatgacgatgtgatgtttggtctcagtttcggagtacgaagcacatttacaattatagagagggtaaaaatcctgaaattaaattatttaattaaagaaccattttcaagtctacctggcaagtccggaactagttcaagcataggttctcggggagagacaccgcggagctatagggcgagatctatcatctcactattttgacactaaaccacagctctgggtacaaccaagtcgatcttccttaccttacgccatacgggtgaagtatcgtttagcgcccctcgactaataggcctaatgccgttccccgggagcccggcgctcaggaccgtgggtctcgacatcattttggtatgtatcagtcttgctcgttggatctgggggaatggatctgtcgaatcaaaggtgtggaaactctgtttttcctttttaattcgtttatattacctccgatctgattaatcgctatcagaatcccatttttaatttcttttccctttagaattcgcccggaagaacactacctttccccccgatggccaaaatgtaaataaaataagtccaatccctaaaagaatgacgctggaccgatatcttcctattggccctaacccctttccttacctccggggggattcttccgcttccccctgctctgcttaacggaaatgtcaggtttcgacctcagatccactaaataggataaagggttttcttttttattaaacggaaatcaaatcgaaaataaaacaaaaacacattaattacaataataaagaaatctgacccacttcgttcgtctttatcctgaatgtttgccaactgcatcctgtacagctgtaaccgaaatctctagttgtgatgctgaacggttgacgttttagttctttggcgcctgatcacttctatagacctatccactgtcaggacttcttattataatagcctcccctttcccggtcttttctttccctactctcttctaactactcttgacatctttcctcctccattgggtttatagatcctctccttcagcctcctcttgtcaatcttctctataaactccccggactcccttgccgctgtctcatacgcacatcgtccctgccttattggatcttgatagaatttaccgcagggggagcaatgctgaagccctaaaccgaaaagacgctgctccttgctccaaccacactagcacattctctcccttggcgactctggggaaattaagcaaacaaaagcacctttttatctggtactttgttcctgcttttcgtcttttttttctgagctatacactcttaaagggaagtggggtgtctttgagcctctgaaatcctttggtctgcttccagctcatttcgaccttctcacctcttctctctcgacttcacaatgtttcaactaccagcctgtttacagggccgacgctctcgcaatggctcgggcgataacttctctacattcccaattcggcaactattcatcttaggtaagtttggtacttttgttctgatctatgaaaaaaaaaagatatggtagccgcaaattcgccgcaaaccatatctatacacaatgagttcaatttctgacaaaggcaacagcactcgtccggatctgtgaaccaattgctttcatgtcaattttcccatacgtgtatcacatggtcgaatcattccatgtgacggataacgaccgtcaaatcgccctgtacgccggcatgatcacctcctcattcacttttgctgaattttcggcgggcatgttctggggccgcatgagtgaccggattggtcgtaagccagtcctcatcatgggcctcgtgggcacggccatcagcatggtggtattcggatttgcgcccaacctggccacggcgatgattgcgcgagcactgggcggcatgctgaacggcaacatcggagttctccagacgacggttgcggagattgtgaccaagaaagagcatcagccacgagcttattcgattatgcctttcgtgtggtgtcttggatcgatcattggaccggctatgggcggcgctttggcccagccctgcgacaactacccggccctcttcgctcgcagtacgctgtgggataaattcccgttcctgctgcccaacctcgtctgcatcaccgtgctgatttgcggcatcgtggtcggtttcttgtttttggaggagacgcacccggagaagaagcaccgtcgtgatcccggtctcgagctcggccactggttggtcaatctgtgctggggctcgcgcgtgcagcttcccgataattccgatgtggacgtcaaggagaagtacttcgacgatgcacctcctggatacgaaaccgccgaatcatcgccttgcctgcgtcccgtcgatgacggcgcatcggctgattgtgacttggagggacagaagagccccgcgcccaaggcatttacccgacaagtcgtccttgctatcgttgcttacggcattcttgcatagtgagttggcccccttccccgctctaagccacacccttctgcccaatacgtttgaatgatttactgacctgcattgccctatttcagccacagtgtctcctttgatcagctgatgccggtcttattgagcaccccacgatccgatgacgaggtagtcctacccctcaagtttaccggaggcctgggaatggccacgaagaccattggtttcatgctcgctgtgcaaggagtgtactcgatgatcgcccaactgtggctgtttccatttgtcgtcaagcactttggtactttgcgcaccttccgcttcgttttgcttgcatggccccctctctacctggctgtaccctacctggtccttcttccggccaagttccaagtgcttgccgtctatgtctccttgatcagcaagatcacattccatgtgatcgccttcccggccaccgccatcctgttggccaatgccgccccgtcttccaaagtgctgggatctatcaacggcgttgccgcctccactgccagtctcagccgggcgtttggtcccaccatcactggtctgcttcactccaagggtcttggtagtggatactccgtgctggcctggtgggcctgcggtcttgtctgcctaatcggcgccatccaaagtttctggatggaggaatctccggaacctgagcgcttcaagactcgtcagcccgaggtcagcgaatccgagatgaagcgtgaagccatcccggacttcagcaaccaggctgaggactctgacgagctcccagaggaagagcagcggttgctttccttgcgttctagtgtcgaccatgactttgacattacggaactcaacttgaacaccgtcgataacttccccaagcctcaaggcgatctcacccacgataccaacgtttaaaactgcgaagcttgcatattttgcagcaccaccttttactttcttccatgcttctggaaggcatattcatttcagcgctaaggcgcaacgcggttttcttttttgtcacttttttcttttccccgtcatcacgatacctcactctgctatttcattctcatgactttgagaccgggaaacggcgcaattatagatggttgcattgcgtatgctgaagcataaaattttgggtctcttcttttctttcatgttatcttggagcatcaacaggttatattatgactattcatgtgcatctgggaggttattttgttattttgttcttcgatctgtgttctctcgaatatcatgtctctgtcggttagagtatcttgctacagactgctcaattaacggccgtcatcttctctatcaactttgatcattttctagccatgtagtctcatagtttcatgcctcctagcctgtttcactccttcttgcgctatattctagacaatggtttcactacaggctagcatatgttttccgacggtgtccggtcgattaagcaattactccttaatattgacaagatcatacggccagcatgttttataaatccccccctccccgctgttctccccccgctctcatccccctcatgtccaatgccttgtcgtaaacctgacagcggggagtgggggaggtccaccaaatctccctagatgaagctatatcagattcaatcttcattcttcaaacaaaggtcccgtcaaagtctcatcgaactcccatcaaagtccgataaagtccatcaagtccatcaaagtccgattggagtccgattagatctcggcatgtcagagcctgggaaacccgagatctcttcccggggtaactcaatttcccaactccgccaatacactctgactatggtttcttctcttcctcatattctcacaggtctcgtctatggtcgcgtgttgcaattatttgctcggaggataatctaattccgaggtttccgttttggggccaatctcttttccattcgatttgacacgattggcgcgattggcacgataaatctccaatcaccgaacgaaacatagacgaacactaaaggtatttcgtggtcttatcatgttgatctgctctgggggagttaaatcgcagttcccgaccattgtccccgcaaaactccaccaagagatgatcgcgactctgcggctctcgtctctcggttctcacaatgcctaaccctccctcgccgctatcaccagtctcttcaggcaagaagagaccacatccctccaatacccccccagcccaaactgaccccgcgacgaattctgcttccaatctctccgccccgacagcggtgccctccacctcgcccgcccattccatcgtccccgcctcgtctgcttcctcctcattccgcaatgtctccgcctgtaaccgttgtcgactgcgcaaaaatcgctgcgaccagcgcctcccgcgctgtcagtcatgtgagaaggccggcgtgcgctgcgtcggatacgacccaatcacaaagcgggagatcccccgcagctatgtctatttcctggaggcacgcgtagcacatctcgaaaaacaattagcggataacaacattgaaattaagaaggtcgtcgctttcgacgaggaggaggctatcaagctcgaagctgatggcgacgccgcgcaacctcgtcccggctcggacggccaggctggggaggggtctgcagcggagaaagcacagtggaggaatacatcgaaagaaaatgccggtcgactagagcggagaggagaggggggtaatcgtgacgcggacgatgatcctgcgaatgaggataattggcgcctgcataatctggtctcgaatatcggtatggtctctgtacagggtacttccgacccgcgttatctggggtcaacatcgggaatctcgtttgcccgtgtcgtcttcgctgcggtaaggagctcactacccggtaatataccggaccgtgcgattcgaacgagcgatcgattgccccagagtgctgcgggcactgctgggggtgggggtagtatgcgcgattccttcttcggactgcagacaaggccgatgatgaaatgcgcgactttccctgaccgggagctggctgaacggctggtcgatctttactttgaacacgcgaatcctcagatgccgattctccaccggggagatttcatggagctgttggataagacttacttgttagaggagaaaaagcgttctccacgcgcgctttatgtgcttaatatcgtgtttgctatcggtgctggcatcatctttgaggataagcctcaaagctcggatgatgagagtcgcagtagtcgtgaacggccctcgtctgggacgaagagaccgagactctcgagccatcagtaccagccggaggaataccatgcctcggcaatcattcatttggaatcattccttggttcgtcctctagcgagggctttggtggattggaagagctgcaggcagtgctccttctagccagctttgccctattacgacctgttgcgccgggtctctggtacatcgtcggtgtggccatgcgcttagccgtcgaccttggacttcattacgaggacggagcgggcattgactctgcaacgaaagacggcaaccaagcgcagtcacggatcgatgctcgtgaacgcggccgtcgtgaatgggtgcgcgatatccgtcgccggttgtggtggtgcgtctacagctttgatcgtctggtagctacgtgtgtgggacggccattcggcatcagcgatcaggccatcagcacagagttcccgtctatgatggacgacaaatacattaccaagtcgggtcttttaacaccgccggacggagcctcgacatataagcatgtcgcattccactacttcaaactacgtctgcttcaatccgagatccacgatgtcctccaataccaacaggcgcgcgctgtgcggaggagaggcgccggtgcagttattctcccgcacgccgagctttcctcccctttccttcagggctttgactcgttccgctcgtggcgttatgatgtgcatcgccggttggttgagtggcaagatactgccccgacacggccggaaacaggcgtgaggttctccattgagctgcttgagttgaattactggcaagctatcattttgctgtaccagcagagcttgacggttccggctgaattggtgggagagctgactcctgcggacgacgtttctagtccgtccttttctaatcctgatgaaggtgaagatgaggatcaagtctatcttaatgttgccgaggctggtcagaaggtcattcgtatctatcgccaattgcacagagtacgcttggtgaattacacctatctcgccacgcatcatattttcatggctggtatgctgttgttctttgcatttctttgcttcattactgacactcttatcaggaatctccttcttatatgccatttggcattcgcctttggttcgaagccgcttagtaggtccaacttgggatttaggtttatacttattctaactttgcctttcttagacccttgatgaagtcgactttactgttctcgcggcaacttctgttcttggcgatctgatgcacaaatgcccaccggctgaagcatgccgagatgcgttcgagcgcatgagcaaagcaaccgttcaaatgtgtttatctacaaccggattcggatcacaagtagacatcagccgtgtccacgccacatcaaacagcagcagctcactgcatcccggccggccgcgacagcatatggatcaacgacaccgcgcaggccaagggcaaatccgacgagcgactccggcacgcccgtcccgccccgtccccaagttcgatatgaacttagcagacctgttcaccgataatacccccttaaccgaccatacccgatctgaaaatagacccgcagggccatcctaccctcctcaagaatcggtagcccccaacttcacagcagaccagtcttcccggtcttatggacagcgcaatccgtcgatggattactatcccaagtacgagaatccaagctccccacaaccccacccgcagttttactacgcgaactcgccgcaacaaagtgcctcccccggtagcaatacccacggtcatgctttgccgcctgccgagactgagactccgcaagggatgagtcttgatttcttggattttgcgtcgggcgatgccgaaggccacggtaatatggaaggcgaagccaatcctgattacaatactatggctgcaccatccttgggtcacaacctgggccagaatgttgggattgatcttggctttggtatggctatggatttccagcatgactggagtgagaatcccaattacgatcttttggagggctatttctttggtggctctggggctggcgcatctggaggggatgtctaggatgtctgttgttccggttcatttcttttgtttggtgtcttctctcgcatttctttcatccccctaccctgcctctttcttgtcaccttttccccaaagacctgggcttagcaagggttgtataattcggcctgtgatttttcttttttcctgcttttggataccatctagacacatatataccgatttacgaacatctgcaaggacaggaaataattaattctagggttaacaatagcatcgagaattatatagtatgttgtagttgccttgcattgctatgttgcttgcctcgggcagcaacggcgtcaaaacaaacactcccgcctttattttttttctcccaacaacacaattcctgcaatgctctccactcagtcatcgtggcactcaccgcacaaaagaactctgtagccctgttggctgcttcacttcgatttgcgcttggacccgactgcctgacctcgacatcaggtgcccacttcgatcatcgattttctattcaaatcacctacccccgcttcactcccccggtctcgctgaaaaagacctccaatcgccacaaacccgaagagcaaactccgaactgtttctcccaagccgagctctgactagcgtttttgaagtggaccctgcggcaaaccgagaccgcggagcatataaggaggctctgccctttccttttttttttttcccactgaactgaatattgcagcatttggcaacatttgacgactgaggctttgattttgctagggttacaagacattgcattcgtttttgttctgcttagtcctgttcaaaaggtcctgattgcgtgcaacgtgctctttacgatttaccttatccttgggcttaccttctatgactggacatgcgtgggaccgccgattatttacttgaacaccgactatgcaattcgagcctgttataactgcataagttcgccggaaatacacgaacaatatggcgaaatcagacgtgcgcaaagattactatgcggaccttgggctccagcccagcgcggaggctgaagacatcaagaggcaattcaggaaattaggtgggtttcgcgaagctatgttttgaagtgataattggggctattgctaattgagagggaaagcactcaagtaccacccagacaggaacccaggacgagaagtcgagttcaacgccaaattccaggccatccaggccgccaatgagatccttagtgacccctcgcaacgactgaaatatgacaccgatcgtttacgcgcaggatatggcaagtgctacggaccgcccaaggctaatacccagcgcaaaacacaaacccccacctatcctcctcgccctacgccagccccggcgtctgcaaactcgtacacaaagccggccccgactaccccgtcggctggcgctcgacgatacgcatctcatgcgcgtgccggcccgcaacaattcaaacaacaggacaatgcgcaaacaagggctgatgctttccatggctttaataatatgagaggaggacaggcagctggatggcagggcttcgatccttccactgggcgtgccactggtggtgtcccaggtcctggggcacagcgtcatccctttggaacctccgcgcagtctacccgtcccaagtctgccttcgaggctcacaactctcattccaacgcacagtctttcaagaagaagcagggctttgcgccaggggccgctggaggggacgagccgatggcccgcaacacctccgcctatagcagcaacagggctgaacggatgagcagccaatactttaagtctgctgtgcccccaactgcgaagaaaccagtatcacctgagccgcctcaacccaaatcacgccattcatacaccccggagttcgaacgacccagcagaagctatgcccaggcaggcaagggtgagaggactttcttctcaagcactggattaggacgttccgcgaccacgcgtaccccctcaggttcttcccatcaaaacgcccatacaggtaaagccagccctccctctggccggtctgggagataccgtagcgctagcccctcgcccaggcggaatgccaataactatgactctaccagctcgagtgaaggggaacagcctaggcccaaacccaaagctgtgccaaagagtcgactcgggccgcatcagaagtttaccgacttctacaacccaggaacagcaagtcccagaaatggtatggacttcaactccttccttagcgcaaatgggcttcgaaccgttcagctaccagatggtagctacgaactccattcgatgcctcggaatcccctctttaatcaacgtacccttgctgacaacaacggacccaaaggacacacctcggatagcgctgctttcccaaaaagctcgtatcggccggaccagcaatctactccatctggttcttcctcttctgtcaagtacgttaggtacacctattatcaagttgcttcgcgttatctgacggacaccggaattagcactgacccggcaaacaatcccaagaggccccagcccgccgcgtatggacggagcagcacaagtgatttgcacaagaagttctctgctgatgattggcgggatcatttttgtcagttcgatttcttgggctctgcctcgccaaacaaggattcactgcccagatcgcctgcctcgcagaatcggggccgtacaaacttccggaccggaacggctcagacatcagcaactggatcgccgattccaaatcctttcggtcctactcctctatatcaaacttcacagtcatcacagcaagagcaaccaccaacgccctttgcacaggcaaagttttctgcagattcatgggctgaacagcttcggaacctctcgtggaatgtaccagaggtcgagaaagccaaacaaacggcaaacgctgcgccgtctcgtagtccaaacaaacagcctagaacaggcatcaaattgcggaccgctccgcagcaggcaagtgttgctactgaagcagatgaagctaaagaaaccctgaatggccagacttctgggccagccgagacagcagcaccggacgttgaggagatggatatcgacgaggaccttcctactcagaatattccgccgagggccccagttgagaaaccaagcagtggtagctatcccgatgtggcttttcaggctgcaccagatgcgccaccagtcaagaagtccaagcttccttcgggcacagaagcccgcacccctctatttaacctcgagaatcttcgcaataccgtaccattcaccaatacaactggcggaggcatcgagaacctagaagacatccacactactctccccttcgaatcccaagccaagcagcaaaggaccacaagagatgacatccgccctcgcacactccaacttccaaacccacccaagcgaccctgggccccgaaaccagtcctcctggccccgacctccaagcaactcgtcctcccgcgggataaatggaactggtatgtctcagcaatgggagcgtacatgcatgaatggaatgcattcaactgccgcatactcacgcatttcaatgcgcgccaagacgcgaacgaaaccggtctttcgccgggctggatcggtgccttcggagactctacccgtctcaaaataaacggcgcagacgacgacagcaacgagggcacgacaaagacccgtaaagatcttgatgattatcacgttgacgaattcctcatccctggtaccagtaagggcggctttagtgcttatctccgtggcattgaggaggatatccaggtgcgcaagcattgggaagttgcctgtgagctgcatcgggaatgtatccttgatcttggacgattgagggagtggatccgggatggcggcaaggtggtttgagttttatcactgaatgttcatggtaaatggaaagccattgctgaagctgcatctacgttgcatcttcagcttaaatattgggaggctcttctccgatttgatctgacctgtttcctgcagtttggcgtctccgttcttctttcttttttcacttctattgatgtcttctacatgcctttttgatctctctctcttttgcgatgcataatgacttggtgttgttgtgaatacccgggattttatcacatctgcatagatttgcctgactctttcatcgggctctattattatcggtgttttctctcatggagttgttgaagcgggatttgtactaggtactaggagggtttttcttatgttgttcaagcttaaccaatccatcattatcccatggctttcgtcctctcaatgttctgaaggtaactaagtcgacctatttagcaaagttggggattactggtcagctataccacaagcagttaggccagtatatgaaattagcttgatttcaaagcttcaatcattccaagtcgagtaatatctagtacatacaacgttgcatctattgcaatgcgaaaagcctgggatacgttggaacccttgccctaaccctctctgcctcaggctcctcagatgaaagccaaggcatcaaggcaccaggcaccaggccccgccatcccgccggatctgtgacaacgggagttcacggaaaattggtctgactcactgaaaagaagatcaaatttgtgaaaaagaggtcaatttcatatagccgacgtataaattcctcgcatcgaattgttcctggccgaatttgccttgaaaactcacaccggcaaacttgaccctggccccgctatcggctccagacattctctttcgccttcgaacctaccccaccatccaaagcaattgatcgtgcataagtcggacttcgtgaccttttcaagcgtgcaatcatggtttcaatcgttctaggaagtcaatggggagatgaaggtaaggggaccaagaccagacagagacattcgacatgctaatgaacgaacaggaaaggggaagatcacagacatgctgtcgcagactgcgacactttgttgccgtgcagccggcggacacagtacgttcaactcgctttgcaatccctctaccccggagtgttgaagttttcaaacgagccgtcccaaaaaccaacagtgactgaccaaccggcctttttcaattggatacagatgccggccacaccattgtccacgaggacgttacctacgacttccacatccttccctccggtctcgtctcgccaaaatgtatcaacctgatcggtgccggcaccgtcttccacgtccccagtttcttcaaggaactggctgctatcgaggccaagggcctgaagggcgccgcccagcgcatcttcgtctctgaccgcgcacacgtctgcttcgacctgcactcggtcgtcgacggtctcgaggagaagggtctcggtggccgcaaggtcggtaccactggcaagggtatcggtccctgctacagcgacaaggccgcacgccgcggtgttcgcgtcggcgagatcctagacgaggccaccttcgagcgcaaactgcgcactttggacatgtcataccgcacacggttcggagacctggcatacgatgtcgaggaggagattgcacgattcagggtacgcatgaaaatacggccatttccccgttccaccgacgaatgactatggcgcgacagcagaaatggaaaaatcctgattttctgcatccacgtcacaacagaccgctgacaatctctaggaataccgcacactcctcaagccctacatcgtcgaccagctcgagttcctgcaggcgcacaaggactcgaccaacacactggtcgaaggtgctaacgccctcatgctcgacctcgaccacggcacatacccgtacgtgacctcgtcatcaaccggtctgggcggagccgtgcaagcgcttgccctgaaccccaccagtatcaagtccgtgatcggcgtggtgaaggcctacacgacgcgtgttggctccggacctttccccagcgagcagctcaacgaggacggcgacaagctgcagaaggttggacgcgagttcggcgtgactactggccgtcgtcgtcgctgtggctggttggatcttgttctgtgccgctactctcacgctatcaaccactacaccgcgctgaacttgactaagcttgatatccttgatgactttgatgagatcaaggttggtgtcgcttacatcttgcccgatggaaagcgcactactggtactttccctgcggatcctaatgtcgtcgacaagattcaggtcgagtatgttactctgcctggatggaagtcaaacactatgggtgttcagcgctacgaggatctgcctcctaatgctcgcgcttacattgagttcattgagcgtgagattggtggtgttcctgtcaagtggattggtactggtcctgccagaagccacatgatcacccgtgattaaatgcatctcttatttccttctgtttggttttttttgttctcacgagtgactgtttcttcgtgcatattgcgatacacttgggttgtctgatataagggttccttcttgtcccatattcaacggtttagattctcgaaaatggatctggttagaggcggccaaagtcttttactgtttattaccattgttccggtagaaagatgttctgtcaagatgaaaattgagtcctggatagaataatggcaaagaagtagaagatattgtacatgaaatcaaaagtgatggtcagatcttcgtatccagaaaataatcccgcagaacaaccaagtagagtgagtataagacaaagaggagagaagtctagattagaaacacaaagcacccaagggtgtataatacacaagacagtccgaaaaaaagatattggagaacgccgcccaatgccagaatggatccttcatcttttcacttttggctgactggtctcaccggacagcagccttgctatccatgagattcccagacaaattataattgctagcgttgctggcaagagttgatctctgattcaactcaaacttagaaccggaactcgtcgtcgttgaacgagcggcgaggaggacgcgacgagcggtcaccacggtcacctccacgagagaagccaccacggtcgccgccgcgagggaaaccaccgcggtcaccatcaccacgggagaagttgttgcgctcgccacggtcgccacggtcaccaccgcggtcaccgccgcgagagaaaccaccacgatcaccgccgcgagagaaaccaccacgatcgccaccacgggagaagccaccacggccaccacggtcaccaccgcgggagaatccgccctcgcgtcgctggcgggtgccgtcacccgcgcttacaccgtcctttcggttgagacccatttgctgcatcaatctagggctgagctcagggagggtttgcatgttgtaccccacggtgaacatctggttgagtgcctgaatggcatcttgcttgctgctgaagttcgcagtggtggtgccaagttggcccatgtaggacttgaccttggtagcaccgtcacactgggccagaccctcgttaatcttgttgatgatctggccaactggtgtctcgttagagtgggtctgggagagatctgcatcggcagattccaaagcatcgtccaccttcaatgggagacggcccaggcgcttccggtaagcgtcttgttcgccgcggtgcatgaacagccaaccttcaccctccttgccagcacgggctgtgcggccgagacggtgaatgtaggtctcacggtcgcgaggaacaccaatctggacgacgtgggtgacatccgggaaatccataccacgggcagtcacgtccgacgagaacaagataccctcgcgagccctgcggaagttttctgcgctgcgggttcggaacgcctgcgtgagacgcgagttgatctccagcattctcatgctgcccatggaagactggcggaactctgaagagcgagcaatggcgttaaaaacatcagcggaaaccttggtctcggcagtagagttaaagtaggcaatggccttgaaaggtctcaggtcctcgccgttatcccgacgcgtttgccaattctgagcgagctcaagaagggcgggcaggttgttctcaagaccgcgcgtgtatacaagcttctggggcaccctcacgtgggtgggaacttcatcttcactaacggtgttgacgtgcttaaagcttggcttcagggtctgacgaaccatctgcataacttctctgggaacggtggccgagaacatgagtgtctggcggtccacctttgtggggtcgggaagcagtgtctggatctcttcaacgtcaggagcgaaaccctggtccagaaggcgatctgcctcatcgaggatcagagtgttcagcttgggagcagaaacaccagtccaggggtccgagaggatgtccttgagacgtcccggggtgccgatgagcaggtggcatccctcctgttggatcttggcaagaccggcacgtttctgcgtgccaccaacagcggtctgaacaataagaccagtgccaaacgcaaccttcctggcttcaactgcgatctgttccgcgagttcgcgggtaggggagatgataagagcacggatttctgaaggagcagttctggctgagcggcggccaaccttggagagatcgacaccagggtcattcaaaatattctggagggtgggtagaaggaaagcaagcgtcttgccggttcctgttttggcctgagcaaggctgaaaaattttgcaggttagcggaccaatcagtgtcaaggtaattctgccaatcaaacttacatatcatcgcccttgacaatctcgttgatagtaagagtctgaacctcagtcatagtcttgaggttcatccggtcaggttgaatgatgttcttgataatcttgctgtgaatgaaattctccgccgccaggtcggcaaactctgtgattaacgcaggcttggaggtcttgatctcttcaacaatttcctctgcagtagcctctgcagtagccgcagacatcctcgggaaagaggaatggagtgatctggttgcatcaagagatgcaagagacgaaggagcttgccatttcggcagctggctagtcaaccgcgctgagattgaacgaggtgtagtagcgcgcaacgcgtgtgaaacgccaaatcggcgaactgttccaagcatcatgatagaatgctgatggaaaaaattggatggggggatgatgaagttgcaaattgcactcgggcattacaaggagaggcgcaaaaataattacggggtcacatgatccttatcgaaagataacatccgagataggagaaaataaacaatcgtggcaaacgcggcaaacacggcaaacatggcaaacatgcgaaatctgccaacccaacgacggatctactaagaattcttccatatgttgttataaacatgcaatgatttgggggaaaatgcctgccactagtaattgatggggtttgaatagttcctaggcttacagttctacttgcagtgaatatacagagtcactactcgattcaaaagagtaaagctggtagatgtatagctcaagttgtgaattcttaaatatatttgtatcttcatactgttcatccgagtctcgggaattttcttttggatgaattgtggcaggttcacgctggatctgaagcgttgtagtcgtattcaagagactagcgggagcatctcgaaacggtctttgcgagagagcgagagagtccttctaatttaggtcgccattcccgtagcgcactgatgatcgccagtgttacgagccaattcgattcagaagaaaagagtgcaattcagaccaaattctaagtacgaagaagaaagggagaaagagaaactatctgagtgtatctgagtgcgcgttcttcccttcttatacccttgcgtttgtcttcgcttaatttcgtccgaccacttaggaaggtacaaggacatagtcgttccttcctcgtttggcaagtacgaaaacgtgaccgttcctgcctcgtttggcaagtacgatccttcccagatcgtcacaggaagtagcctaagtatatagtcgaccctttgcaaaccttgcaaactttgagccttctcgcttagcaatctagcaaatatacaaacagcaataagtcagtaaatatgcaaatcgtcggaaaagcggccaggaagacggtggacgtttatagtaggcggtcagtctatgtacgaatatcgtcacagtcagtagttctttatcacgagcttcgtaattcaattctgtggcctgcataatgcattgttttggagaaaaaggccaccgggtgccagaagatgatgaacttgacaatccgttcgtccgagtaatggggatacaccttctcccaaaccccacattttggagggtcatagtgatattggcgttttggtgtctcgtgcatgaagatcagcctcttcttcatgtactccatccaacccctggtaatatatattggttgccactcaatagtgaaaaacatcgaatggaaatcgaggggcactgtccatataaagtctgaagtcgtcgacaacgtagtcgatattggatcccttcatgacgaagtacaacagatctttactgtagaaagaatcacgtacagcccaggctttcgcggtttgaccgccatgttttctttttcgtgattccttttgtcgatttgaccttaaataagccaataccgaaccgtgggagatcacactcgagtttcggtttggtacagaatcccagctcgtcgtgttccaatttcttcgtggaaaacaggctatcaaaagccgattatccgcgatcaggttggtagctttggtaccatcgaacctgccaaattctattgcaagaagttcacgaaaagcgagattctctgaagagcattctcgaaatttggaagctttgttgtaggatcctggaggaagatcaagttagtatgtatgctcgtcgagatacttgacaaaaagccaaattgaacttacattcggaacgataacaagcgactcaatcgagcagatttgttcattgaacattcggaatgtcgcatttgcagcgcactccgggttgagaacgcctctctccttccacttgatagcaagaaacacccattgtttctgatcgttgagggaaaggattggacccgttcttgaatggaagtagttttgttgggcggttgtgaagcaaatgacccgaagcttgatgctactgctgtataactagttagatgtcttggatccttccttatgtcagctaagagcatattcgaaaagtgcaaatggatagtaattacctgcaagactggccacttatatagcaatttgaatgccagagggcaagagatagatcaagcatagatatattatatcatatatgttgtgagagtttacgaggaagaaaattgaaatggttgttctattggaaaataagcagcccaggaatacatagacaatgggagccttgaccaataatatctgtaggtaaaaagcaaaagatgctatatgtaacctgccaggtcttgtaaaggaagagtgcactcagttcagaacaactaagatggagagaaagaagaagtaagttgtaaagtgggaagcagccagttaatatagctgacgacgttgcaaactttgcaaacgtcggacatctcgcttagctgtctagcaaacaatctatctaatgcaaactaataaacaatgcacatagtaagcgagcaagcaaacgagcgagaaagtgatagtgatccatgtggatcatgacagcaagtaaacaagcatataatagacaataatatagatcgtagcattcactgtctacattgaggtggcttcatgttatcagcatataagagaggtaactagttagttaggtagcagtacgtagccttagaaagaatggtcagtcatttctcttgattagaggttagtatagcctgttacttttcctattcaaaggaaaattgaatttacactgaagaaaatgaagcccaacttgaccaaactggacacaatctggtgcccatttcccggagggtaaacactatattttcggagatgatgttggttgttgtgcctgggtaggagtgcatatagcagtggatatttggaacttggaggatcaacatctctgaagatctggctatttttttataggccgtcatatttatacaaattgccgctcatttcagttactatgtacatcgtacagcgctatctgtctcttctcatcttcttccttgatgttatatgtcaggtcatgtgctttgatagtcaaacaaacaaacatgtcaaacacagcaaatcagacaaacacatcaaatctaaggttcagcctaaaccttggaaagcgcaaattatcttcgatagccgacaatgggagggtcagcattaggtagaaattagaaatgcaaaattcgctgaccaatacttttctctctgaatcgagcgctagagagatgccaacgaagtatatacgtatctcaggcttacttgctaaccttgcatacgcgcggagagcagatctcatctgtcacataagaccctcccttctcccgaaacaaaacaggaaactcactcttctccacttcactgactctatatcatggcccctattgatgtagttattgttggaggctcattcgcaggcctccatattgctcattctgtgcttcgtgatgtacctgatgcaaaggttgtgctgatcaacccctcaaccagcttcttctggaatattgctgccccacgcatcgtcgccaaacccaaggccttccgccccgagcagtacttgctgccaattaaggaagcttttgcaagttaccggccggacgcgttcgagtttcttccaggagttgcgacggctatcgacaccaccgccaagtcagtctccgtaaccccgaacgagggcgagcccaagaccctaccatatgattatctcgtgatcgcgtcgggcagcactacatctgccactaccggctcactcaccggcacatccataccattcaagcagtcgaatcgcgatgatatggagcagctgatcgagtcggcacaggaaatcattgcaggggcgaaggagatcgtgattggaggtgcgggtcctatcggtgttgagctggctggtgagcttgccgacgcagtggaacaaagcggcaataccaacaaggtttccatcacgattgtctccgcgacagatcgcgtgctcccaatgctcaagtcatccgccagctcggctgcacggaagcagctagagcacaagaaggtcaaggtcgtgacctcgaagcgagtcattggggtcgagactccggccgacgatagctccaactggactgtctcactggaaggtggagacaagctttcggctgacctctatatccccactaccggtgcgaccccgaacaacagttttattcctactcagttcttggacaaggacggttggatgaaagtgaacaacgagatgcgtgttcagtcgaccgacgggtcaaccctgcccatctttgctgccggtgatatcaccaacttctcgatgcgcctcagtttcaaagctatcgagcaagcgcatgtggcggcggccaacctcaaagcggccattgtaggtggtactgccatcaagaccttcgaccagggcgatagcattatgatggtcgtgcctattggtgaaactggtggtacgggacaaattttcggatttgtacctttcggcttcatggtcaagatgatcaagggcaagcactactttattgaaaaggccgacagcgtactcactggcaaggcttaggttatccccatgattaggcgtattcaatgatgcgaattttcagtttataatgctggtgcatatttccggcaatgactacatactgatgtaattaatgcataattttccaatccaagaatgcgaatgtgaatgtgaatgtttttatagcagaacaagaaagattgatgtatacttcatatagtacttcatatagcactccgtatgtaggtccgaaatacactccgtgcaacgtacaacgtacgtcctccataacccgctttatcccaaaatggccaactggtccgttgcttaacaatcgtgtattcggcttgtgtattaatcaacaattagcccatttggttgagatgccgagggtcacggttttcctacctaaaatggctgtctccgtcggcctgaggtgtcttggattcatccgttccccactgttttaagaaaaaactggttccgttgccacagttatgtgttcatcgtacactcgttggacgtacgttaggggcatgggtaggggaattatgcacatcaaaccataatctgtagaaagtggagtatattccctggagcatcaccatctcgagaagcttctccgtgatccatctggtttataatctgaaaagcaaaacggattggtatttcaaatctgatcggtacagccccgctttgttgaacagctcactcatcatataaagagctccctccatacttcgggggatttctacttcccatatttatctttcctactacacatatacaccatgtctaccaacaaagctctcgtgttcaagaagattcctcagggatatcccgttgctgggcaggacctagtaatcgagagcgccgactatgatgctagcgttgccactcccgacaacggtgtcgtcgtgcagtctctctacaccagcttcgacccctacatgcgtggccgcatgcgcgccgctgaggccaagtcgtacgcccccgcctttgccctcgacaagcccattgatagccgcagcatcggcaagatcgtgcgctccaacaacgccagctacaaggaaggtgatgtggtcattggccacgttcctatccaggagtacgttgccctcagcgagcccgagctcgtccgcatccaaaagctggacaaccccctcggcatcgaggacatccgtgtcttcctcggtgcccttggtatgcccggtctgaccgcatactcgtctctgtacgagatcggcaagcccaagaagggcgagaccatcttcgtctccgctgccagcggagccgtcggccagttggtcggccagctcgctaagcgcgagggtctccgtgtcattggatccgtcggctcggacgagaagctcgagtacatcaccaagactcttggcttcgatggtggcttcaactacaagaccgagaagcccgctgatgcccttgctcgtctcgctcctgagggcatcgacatctactacgagaacgtcggtggagagcacctcgaggctgccctcgatgctatgaacaacttcggccgtatcgtcgtttgcggtctgatctcccagtacaactctgccccgtaccccatcaagaacatccacaatgtcctcgtcaagcgtattactatgcgcggcttcattgtcggtgataagggcatgggtgatgcttacaccaaggagcaccaggagaatgtgcagaagtggatcaaggatggctcgttgaaggtgctcatccatgagaccgtaggcattgacaacgctgccgagggcctgattggcatcttctacggcaagaacttgggcaaggctgtcctgaagttttaagtgttttatgagattgatgaaatagcgagatgcctggtgcatatatttttgttgaaacattagctaggaggtattgaatacctcggttaggactgttcagtagggacaatatagatacctctgaaaatagtcaaatcgaacaaacgttatacaaaaagaacatgaacataccgtaagataaatatcaatttgcaacgaacaacttcataaagactacagatatactccggagccacgaagaagatacccgcagggctaaatggaggtttctcatagagtctcggccaatttcggctgggcggatagccatcgaccaatcaaatggcccgtaaaaggatgacatattgactcggattcccgagacctccaacttcatccgcttgtgttcgaacagcgtttctgcttcttcacatcatactctccactcacaatggcttcatttgcgcgctcaactctgctgcgacagactcttgcccctcgggcacccttcctccagaagaatgtcggcgtttcgcaggtcgtcgctttccatgcctccgctaagaagcagatcctgcccccgttgcctcgtaagtagaggccctgccgtaatgctcattgaggcattgccagtggagagatctattgaatttcgtttatgagcagttactaatttgatttttgcgacacagagaccattgacggaactggtatgtgatttccgcgcctttcctaccgagtcttccctctcttttcgatggcattgagtagaaatgcctgcaatgtgtggagatatgcagtcttcattgctcccagcgctcaattaatgcccatcaaatcgcaacaccgtatttcccgaagtcttcgatattaacctattccaatagtgaatgacgccgctcccattcccacaccccacccttccgagggcagctatcactgggattttgagaggtttgtgctcccttttgcgcactacaatgtcgacctctgcaaccccttccggtaaccccggcaagctcggaggaaaaaaccggctaacatctataccagactggtctgcgtcggcctggtccctctcaccttcgctcccttcgccgctggctccctcaacccggtcatggatgccgtcctgtgcactctgcttgtcgcacactcgcacatcggattccagtaagaacctccccgcgctattccgctattcccctcggtttaccccacatctgcaaccggaaatcgcaatctaacataactctaccagggctgccatcgtcgattacttccctccttcccgtgtgcccaagacccgtgccacctgcaactggctcctgcgcgcgttcactctcactaccgccgttggtctgtacgagttcgagacaaacgacgttggtgtgaccgaggctctgcgtcgcatctggacggcatagagtgctgttacggttccttgtttcagaaatattgtctttttatttcctttttatttcctgcttaccaatttggttctggtccatccaggcgttccgtcccgcctctgtgtatgtcgttgattgtttttcttttgtctctgagcccgaatctaatgatcagtgccggattcctgctgctcagggttgtgagctatagaaaatcaaatggaatataacccctgtacaagacattcttggtgctttttgttttctgtatagtacgtagtgtagatatgcaaccaggttctttgtacactttaaatggtcagtagtattcaatagagtacagtgcttctaccaacgtttggattgctttctaatataagttctaatccttttatccttttaaattctatcagaatgataatgtaaagacacaagtagacaaggctaacagcaaacaagaggatctaaactcatacaaaacacccctcattcatcctcgatctccccatcatccccagaaaaggcatcctcatcatccgccttctccataacagtctcaataatcttgagcgtcgccttgagcggcaacccaataacattatcagcactgccctcaatcttctcaataagaatcgacccaagcccctgcaacccataaccaccagccttatccgcgccctcgcgcgtgcgcacataagctaaaatcaactcatccgtaacatcgccatcaaactgcaccaacgtctcctcaaccatactctcaaccgcataccccgggtctcgcgcactagccaacggcgccatcgccacaagcgccgtgtagaccttatggtttccgacgtcacgcagcgagcgcagcatggccacgtggtgtgcttcggagcggggcttttccaggatggtgcctgtagacgggtcgacgacgacagtgtcagcggccaagatcagggctggctcgcccttggcctcgttgttgatttcttgcgcgtagactgcttcggcttttttcgtcgctgttgctagcacgtactcgagcgggcctaggcttttgggtaggtcttcctctgcgttggaggggatgatttctatgttcgggaggcccaggaaggacattatgtgcttgcggcggggggattgtgaggcgaggattacgcgcctgctgcggaggctgttgaggatggggaggttgagcggtggtgggcgtgggaggaggagtgatgcacggttggcttttgagatgggtttgtcgtaggcgggtggtgggtcggattcgggggcgtcgatgttttccatgtgggataggagggcttctttggagtctgtcattttgggcggttggtcgttggtgtggcgggcgatgcgatgcggggaatcaggtgctttctccgttcgcttgtcgaggcaaatggtctttgtgtgcggttgattgaccttgcaaggatatgcagggatattcaattggggatcccgactgtccacgagatcctgtatgttacaggtttgcgtggagtgtagaggctgcgtttgcttcaccctgcaggggctcggcagatatcaggcggtaagccgaagttcttcactatcgaattttgtgcagagtctatatcggtatatcaccttggtcaccactgcattaattcattatttcgtctaactttccgaggatatactcctttgtataatctggttggctacctaggaagtgcatgactgcaattattctccgtaacctgttcacgtgatgcgaccgaagtacgactcggtcaaataattccgactttaattgaagtaaggatgtcgctgtgggtgctcagccagagctgaaaggaactcgatttcagttaaccgttgggaaagaagaacgccccagttgcttcgcagcaacagccatgaccatccatatacattctggtaccaggagcagaaacaaaccagaaaaaagcttccatgtacaatgatcaagggcagtaggaagaaaagaagtaaaaagttgcggcactgcgttgataatcgttcagtgcattgaatgcggtggaggatgcgtgattggcttcaaatcatatgggaagatcaaatctgccgggcaacgaggaagccctgctgatcatttccaagatctcattcgtaatacagggctggagtagatagacaggaaaatgaaattcgtagcgtgggtataagttcatatggtccaaaatttgagaaaaacagctcggacctcggcacatgcctgcagccccggacccccatcgaccagcggaggggaagaggggccgctggataccgaaccaaagcgcaatgaaatgtcgaggagaataggatcacgttgggcggaaagagtcgtccacgcggccgcctttgctctcgatctctgcgatgagatcgtggcgttcttgcagctttacgtggatgaagtccacggtcttctgcaaaacgatgctctcactccgaccctggccctccagaccaggcaccagctctgtgaggcgatcaaagccttcgcgaatggctgcacgtcgtttttgctccgaggcaatatgattgctccttttttcttgatcggtaagacgaggcttgtccttgtcctgggcagatccctgcttggatgtcccattaggcgttgaggacgaccgatcatggtcatcgtctggattcatcgtgtgtttgatgactggaggtttttgagagcaactgaaagcgtatggtagatgcgccggttgtatacacggtccggggctcttagtatcgattggacgggatgtatagatgtccttatagctctgaggccccgtctagtcaaggcatcgatgagggaggtgattgtaatcggtaaacaacgctcggtggaagaatgtgaaggagtatgagagacacgggaaagcgataggaagcgataaggccatgggccaatgcggagtaaactggagggccgggaacgggccttggcaacttctaaacgtcatagatgggtccactgaacacatcttgctttttctcccgcccatgtcaattttgtcctcacaccaccttaactttccggtccaatttactaccaaagatcatcattccctcatcgggatttctacttagcgagactactgccgccactcatctccaatcttaaaccatctacctagcccacattgcgaaattatcaacgccgcggaaatcctgtaccaccatggccttggaaccgctccgcggctcatgctcttgcggtcgaaatgaataccaaatcaatattccggacgacgtgacaaaccatgccgaagtgtactttgacagcagccgagacaatcgtgggtaaaccaagccaagcttgccgatctcccggctaatatcgcatcctaggtcgatttcacggtacacctctctcggcgtggcttcgagtacctctcagctggtaccaatcccacactcagtccttcttccctgatgaatcgcactcttccattcgccgcatccattcgccccgccatgcgccccggactcagcgtgtcttctgtggctactgcggtacacccctgacattctggacggaggagcccatcgaagaagccaacttcatgtctgtcgcgatcggcagtcttctagtggacgaccagcacgcactggatgatctaagattgcttcctcgcgacttttacgaggaagctccccgtgctggtatctcgacctcatctgatctgacaccaacctcggagaccgcttcatcctcggtcattgttccatcgactactgattcttcggacatctcaactagtctacagcacggtataactggaggaattccttggttcgaagagatggtagaagggagccgcctgggccgtgtgatgcgtactcggcgtggtatgggagtcagtgacgatcaatcaacttcgatccagtgggaatttagcgaatggcatgatgatggaaccggtgcaggtggattcctgcagcaggatccggactcgagcgtactcttcaggggaaatcgcaagcgggtgaatcaggccgatactggaattgagtctccaacgaagcgagcagggtaatatctgcaagtcccaagcccccattgacgcgtcttgagcttttgatgtttaatgtaataaaagataaattgacgctaaagccttttgttttatttttcggacttggtgaaaatcagaggacggagagtaacagaaagacaatcaatactattcgctagagatcttgatagaaccatctagatcaaatgagtacatatgctatatccatcgctcttactccactacaatatagtttaggaattgatgcttgtaccccgccacacctgaaaatcaggtgcgccttcctaattgggtaccgctcctcccttgacaacagtcacaatctatagaatggaatgaaagacagtctctataatatattccgtcatacagtaagagctatataatatatatattatttggtatattaaggcttagatgaaaaatgtagtactaaaaactagaatctatgcatgtaccttttgtatggcctgcctagtaaaatgtacgtccgttgtagcccactcgcttgcgagaggatgtaatttttgtaacaaaaatgtaaggaccgataaaacaccttacaattaggtggtcgctcacgtatgggtggcgagccgtaatttatgtaacaaacgtaaggctgaaattttgtcgcacagcatacccgaaccggtcaagcgcggtccagacacagcctacaggggcctgaccaacgtctcttaatgacttcctaggctcttttttttaccagtgacaatgtacaaccctttgtcaagtacagatcatggtatactgtggtaaaccaagcaaaggatgcggcgagtgcaggtccaggaagattcggtgcgaccaagcccaaccggcctgttcgcaatgcaccagggccaagcgggactgctccggatatcgggaccaacaggccctaatgttccgcgacgagagcaaatcagtaatccgaaaagcggttgcggcctcgacacataggaaacaagcggaacgatcgcgtcgcagtgcaatcccagaaaggaatcctgtacggtctgggcttagtaccgcgccagtggggcaggtcttggacttccactctgatccacagcatatcaatcttgcgcgccagctcgggaatcgcccattggaggtccagccgtcacaggagttcgaaaccaccaaaaatgaagcaatctgctttttcctgcgatcaactgctatccccggcagtttcttgactactgagatgatctctgactctttggtacagagcggaggcactccgagtcagagagctatgaaggcaagcgtagttgctactgccatggctatgctctcccgggtaagagggctaccatcgcttagagatgtagcccaccgggagtatggatccgctttgagattgcttaatgccgctctaaccgaaatggaggaggcgaaatcaaatcaaacattaggcgctgtcatgctgcttgccaaatatgaagtacggaatttttcaccccctcggatggtttttgttgactccctgtttctaggtgatttcgtcaagagccccgaatgaaattgagagttggaccaaccatatcagtggagcaatggccctgctagatctacgcggcgctgataaacttaagactgacaccgatctccgcttgttcttataccttcggtatcagattgtgagtgctatcgatcactccttcgatcactccttcgatctcaagctaacccctcaacagaccatcagttgcctacaaagagacgtgcgcgtgcctgagtcactaatagaacaaacgaaaatcgcgatgattcttcagccagaacaagttcacggcaatcggctactcacgataattggaatactatcgaaccttcgcgcagacatctgcgccaatatgtacaacgagcaggagatcatatcagcagcgtcggctatcgaagccagtttaattgcctggctggcagctcttccccccgaattcaactataccacccatgtaatcccccccctcgacttttccatccaaaagcgactccgaggcataactccatacgacgatcaataccacgtgtactcctccgcctgggtctgccattcgtggaaccaataccgcagcgcccgaatcatcgtcagcgaaattattctctcccgtgtccggcgattatccgacagttcctctatgactttgttgtccgaagagttgcgtatccaatgcaggacacttcgatcgacgatccggcggttagccgtggatatctgtcgcagtgttccttttcacttcatcggtcaccaggtagatagggtgtctagtctcccgccgcctgaacactacgttgcgggccttgtgctcctctggcatctatttgtggctggggttgttgagaacccccaacacaggctgcgccgttgggtagtcaagtgtcttcaaatgattggaaacacgatgggtatcgaccaggcgctggcagtggcagatattgtggctgatgatcctggggttttacattccgtgaccgaggaagaagactctcactcttcagatcaggatctgacgaggcgagatctagttacgcctagtggaaatacttgcctcggggtatatagcgactgatatagttgtctttcttttttcattcttgtttattatgccgacaatttgtccgtttcttttgtgttacagcctagggtttgggattagcgcctcatgtttcggttctcattatgactcacgagttgtctctaacaaacaatcaaaggaaatcttagatcctctgttatagtccatcatagcgtccaacaagatcccagaaaaagtagagcaagtggtcttccgttcacgttcatcctatgctgcgcctcctgcattagaattgccgtatgcggggctgtgtttgctccgccatcagtcccaaagcacgcttccggactgtctgtgcactttaaacctcttcatacactctatatgattggttaaaaagtgacgctggagcccgataattttaccttaccctgcggttgcccggccctacgaatgagcgtctctcaacatccctgttaattacaaatagggctgcagtgagtcaaatctgcctcgcaattaatgatggcgatggccttttcgatctttgatacacttagggcggccactagattgaatctcatgtgttaatgtccgtgtgttgatcatgcgtcgggcgtaaatccgtggttggttagaagtgtgccttggtctatgcctctaccctatactactctttgtatattgggtttcacagctaagcccctgatggcagacagtagatataaagaagttgtttcccgggtcagatccttctagggcataccatttcaggatatctgagcagtctctaagacaagtctatttgacatatattcctcacctacacttcattttcaacatacaatcttcagccatgggtgtatggaacccgttctcaaggtatcggaaagagcgcaaggcagggacaaccattacagggaccacagtgaccacaccgacgcatcgtccatcatggtcccgaggccgtagccctaatacatcaaatgcccaatcgtcagaccgtccaccaccgtatcaagaagaaattccaacaatcagaatcagcgccccctccgaaccagaatctgattcccagtacgccttcctcggccaattccataccatttttctggtagacgatagttcaagcatgagaggtgagctttggaacgaagccaaagaagccatcgccgcgatcgcgccaatctgcacgaaatatgacagcgagggaatcgacatctacttcatcaaccaccgcccaaagcccaaccccaacaggtccaactacggctacggttatccctacaactccggctcgggctacaggcgcagccccagcggccatattcccggggccaatttcgactacaactacagcccgggccccagacgtccaacactcgatgccagcggataccacaacatcaaaaccgcgcaactagtaagcgagatcttcgcctctgtcataccctctggtggaaccggagtcggggctcgactatttgatatcctggacccatacacgaagctgctggaagcaaaggagacagagagacaagcgcagaagcacgtatcgggagttttggccaggtcaatcgagctggagccggtcgagtcggttaagccgatcaatatcatcacgatcaccgacggggtgtttacggatgatgccgagagtatcattatcaagactgctcagactctggatggccctgcttgtcgtgctattccgtggcaggttgggattcaattcttccagattgggaatgacgagatggctcggcagtatttggatgttttggataaggaccttggcagccggtgtcatgatttgcatctcagagatattgtcgatactgtttcttggcgaaatcgggctggggagcggttggaagggtatgggattttgaaggctgtgcttggggctgttcataagaagttggatcgagatttggagtgttaggtggttggtttctgatttatatatttcccatccaatcgcatattttgactgcaagtgcaaaagtgacatatcatctgcacgaggacgcgctgggggtggagaattctcggatataagtttgttagctgaatttaatttattctccatgaccaatgagagatactgcaggctttacttcggtatattagagctgagcttgcagctttgcgattttgtacaattcatgcactcggtagcaactgatctgttgatctagtcaatctggtcagcctaattgatccaaccgatataattgctctattgctttatttaatctaattgtgcaaagtggtaccttgcataaagatcgacgaactacaatgacggggctggatcggaaagatcgcaagccacaccatctgagaatccgagagtccgagaatctgagatcacatttctttctttcttcttcttcttataacaatcttataatttctcagatcagcacgcatcattgaacacttccagatccactccccatcacggccgaattttatgatcgtcaagtctctccgcgcgccgatctcctaaaaacctcgaattcgtctcctaacccccttctctctatttctctcattttcagccttcaaggctttgttctatcatttctacattccaatcatttcaaccgttttaacctcattttcctcccttgtttcaacatccctgcagcgccaagagccctcttagcgccggactccttacgcaggaacatcaccaacccgagtggtcggcgcgtcctccttctgctcccccattggtcaaccttgtcgccctgcacagcgtcggggaaattgcaccctcgcggttcctgaagcaatcagcctatttgattgtttggtttgagccctgtgtgtccaggccatggcatgttgttctgcggcgttgccccgaacatacctgaaacaaatcgtttattcttagacctgtcacttgaacttgaaacaggcacagcgtgcttccaccggctgtaattatagaaccgcctttgtcgagttggctttgtgtctgtgagctccggggcttgttttgtttataagctcggactttcagctgaggtccaagggtctatagaccgttcttcttgttgctttgcatttgtattctgggattctgtctttagcattttggtttctgattttgcattgttgtgcattttctttctctgatttgttctgttcatttgtgctattacctgccttgctcagcgatctctcttttgctctttttcttattgtcttaccttgcgatgatctcgactaccctcatgacttttttactgtgagtgcgcccagtgcaattgatatctccatgcgctgaccgcaattcagtattaccagaccagaggtccggtcggtcaagctgctcggatcatgggataatttctctaaacaatatgcgatggaaagagatgtgcgcgtcggtcccggaaactggagaggatgccatacctttacggatatgataggtgatgggccagacaagacccaatggcgaacagggggtctgaagatgggtggtacttactggtattatgtgaggctcaattcaagcatatgagatgaaagagctaacgaggaaaacagtatctactcgataatgacatagagtattacaacgaggcagagcctacgaccacaatgtgcccgcttcttccggggcaaccaatgaatgtgctaaatgtccctatcattttacctgacagccgctcacatggacgctcggtgagtgccagctcgcaaaaatccgaacatcttcggaccatgaatcccgaagacaagttcatgaatccgcggaagccgccgccccagcctcagtctgtacggcttcagacatctgcaccagtatgccgcgaaccgagccccgcacggtctgcgagtagatctccgatggctggaatccaccggagtgcatctcagccgcacggtgctcctcggaagggccataagaaagattcacgttctatgtctcctccgagagcacgagccattctagctgctttaaggcaacccgctgaggtggatagaaggttcgagtcagtgcaacatgcgaatgcttctaagctagcacagcggcagaaagaggctgttgaggatcgccgcaatgtccctggaatcaaggttaacaccggagttgcgattccatcttcgagccctcctgacaaatttggtctgtccaccatccaaagtcgtcgcgcgatgaaggcacccgctggggaaacggcaccgagccgtcttctcacagtgcagacgcgtccggatcccccccaaaccagtcattctcgcagcgtaacaaacggaaacaccgtcgaatccgacgaaactcgtgcgatcagggaagccctgaaggatatcacttgctctggtgactttcctactccaactgccgtgtataccaaagataagaggctccctacacttccaaatacgccatcttcggtcatggatgaagcagttcgcgctatcgacgagagagatagggagatggatgacgagatcccgcgcagttacttctccagcatgacagcaacgacaatcgactccgcccattctagctttgtacctgaatacagtcggttctccggatggagtaccgacactgaaaccgactacaacccacgcgaatcgatggtatcggcctcatctaaccatcaccaggacgagtcttcggcggaaagatggacaacaccagacctctcgcagtctggcgatggcgcaaccaataccgaccctaataccccccacctcactgtctactccaaaccctcatctccgaattcaccctggagcgtcggtctccctcaactcaccgtgtccctgtccacacctggcctcgacttttccgggttgggaatcgagaacatggatgaagtggagagcaaccccaagcgccacgctgctctatttagcgcccttgaatcaatggaggccttcgcgatgtcgcgcagccccgacagctccccgatcctgctctcccaagcttccagagactctgacatggagcaatatcgctctttcacagagccgaaagcagagtcgaaaatgagcgaaacttccctcgagcggattcggtcccgtcgtagcaatgcttcgttccagggtaatgctactatgcaggagttgatggatgagctcagttatctgaagaatctgatccaggctgacatggatggggtgccgttttgatgagactacctcagggattttctcatgttcttatatcatattactggcgctggtcgtcggtatggagtttatgtaattcgtacatatatcatttagctctcaatagaggagacattatatcaaaagaaatacatcagaaagaaaaacaagtctccaatgtgtaaatttaaccgacctagtagagagtagagtcaaattgatgtaaactccgtagtgacgttggtgaatccatatcaacagatcggacgaaacaccaaacacacgcgccaagaatccctctgtatccaccacccgcgatcaacagcttcagccaaaaagaaacagcgccacctcaattcttgaacctttgatgttctcaagaataataatgggctgaatgggcaatttatcttgaagaaatacccagaatgacagtcgatggcccccaactgacccccgtcggggagaagtccctaccagcaaaatgcaagccgcaggccatggcgtactgtcccacgatggacctgatagcgctggcgaccgaggacgaggaactgcgcgtattccgactcaatggccagcgagtgttcgggggttcttttggtggagatccgtacctaggcgaggatgaagaggacggcgagattagagggatggcgtggaaagggaatggtaagtttgaatttccttgtcgctgagctttgctatatctcttttcctataatcggatcttacccgtcttgctgtttatttcacgcgcgctcatttactaatgctacaccaggtcgccttctcgctgtcgcgtgtggagatggctcgctccgcatcatcagttcgtacaccgggaagacggtgcacaactatcagacctatcagcagaaagaggaacaacccaatcccactgagaacccgtcacccaaggcgacctgcgttgggtggggtgtcaatttcaccgatagcaaagccgcacagcggcacttgcatgaatccgcgggccaggtctccatcgacgaccttttagccccgggagtgtatccctccaaggcagccatcatgctcaaagcagacttgccaagagagcttgccttgctggacattgagagctcgctgccgaagctgagcactctgcctgcaacaggaggcgaggatgacgttttcagctcgcgcgcgtccctagacgccatcttccattcatcgaaagataccaatgactcggtcgatgtgctctccgtcgggtttagcgatggtactgttcacctgcgtatttttgattgctttgagattggctctttccctgtgggaagctctcccggtatccccgactcgtgccgtatcttgcggcatgcttcgcacccgttgagctctacacatgctctactgacatcgccggtcaagggagacactcgtggtccgcttgagcttgtcacgatggaccttcgctttattacgaagtctgggagatatctgtctcttcttgcgtcgaaaactactcagcttcagaatttgctccgctatattggtcaggtgcagcggcagattgagcttgagtggaagaatgcccaggagcttcctgcgcgcttcttgcgtagtgtcaatgaggacttgaaggaaaaatgccagtgtgattttatcactgctatctatcacctggtggtcactggtcattgcttcgagcccatgaaagaattcctcacggatattgttggagaaagagtaagtgagccttgccatttgggagatggtgtgctaatggacggcatagggccacaagagatgggataaagctgtcttgggcggctacgagaatatccggcgactgacacacgaatgtctcctcccagccttggagcgcagtcaagtacttctcagtcgattggttggattgtctaaattccacaagctaagtgatgtccttgggctggacacgaccaagcttaatgccatcgtggagacacttgattgtctccatcttcttgcacactctgttctcacgcatgccaacgaggaaatgggacaatttaccgctttctctagatggcttcggtacgagattcaggttcttaatagcgagcccttgtcgcagacacgggaagaactgctggagaaaagagacttgttcgatgtccctccaactgtgaagtatatcaaaggcgcattgaccaagagtgctctacggaacttcatccgccaacttcctatgatcggagttgttcagcctcctgcacctcccgctgataagtggcttccagatggccacgaccgctcgttcttcgatactttcaagtcacttcttcaacagcaacgcgagtcccgggacaggggtggcgatggtacatcgatagagacgcctaagctcaatgacttgacgaagcgtctggggatccagtttgagaaggtctttgaagagattgccttgactcagcgcagaggaattctctatcgctcgcctttgacgcttcactctgattgcgaccaagaggttaccgatctgactttctgttacgaggtagtttaagactggtgacttttgtatcgttctaagctaactttcgctacaggatgctatagaaggccagccttgctcagtatatgtcgctacccgatcagtcacatcaaaacatcaaggttcgtcatacaatcaatcatcaaatccagtttcttatactcacgcaaatagtctatatctaccgcatcgtccttgactcagtcggtggcgtcagctcaacaagaagtacctccctcgcaaccctcgacctccaaaacggcgaagtccgccaactccaattcgtcaacgacgacacactcatgattctctggcgcgatagcagtaagtcactcacacatcgacttcatattcctcctctaaattctgtatgcaatctaacaatctatcgaacagaaggatcctcccatctcctcaacttccccttccaacccgactcagcacaaccccaaagcgaagcaagccacccattacctgtagtccttggctacattgaatgtgacagcacgccatccgttccaaaacctactaccccgcccacgacactagatctctcgcctgaattccaccacacgagtgttcttatacatatcttcgctctacatggccctaaggcacggcctatccatgttgatgtcaatggacggaagggacggcgcgctatttgtgttttgtatggggatgctatgcggtacgaggttttggacctagatgctgcgatgggagaggacgaggacgaggaagacgatgaggattaccaagaggggggtgaggaggaagatgacgacgacgaggaagtcttcgatagtgatgaagaaaataatgagaactaggattacattgttatatgggaatctgcgtcattcacgggatatggtagatcaacattgcatcacttcccggtctagacctgcataacttcggataagaacttcaagtaatcctgaaccagttgggggaaaggggagctttatgttatagttgctggcagtgagacttatctgcgcttttctagcgtcccttcttccaagatatatatgcacctatactgtgatagttagttcgttgatagtattgctgctgccctcatttataccgaacgttgtatagtcagatttctgtcagtgagttatgcatattcattgatcctaccataccttgctttacaccctgaattctgtcatatttcaacaccttataagttcagataactataagtccagatggtcacaaattcaggatttgaatttattagattgtctcttaagcagcaaagcctcataaacaaagaaaatcggctatctaaaacttctaataagaagtatcagggttgttgatccattcagaccagttgaccctttggggtggcttagctaggtcgaaccagtagggctttgcctcattccagggtgttggcttaacctcaaaccactgacggaagccgaccataaaactataggctataaattagtaaatccctttagagcaagcacagtgcaactgataaggaggatcgtacattaccggaggcggaataccaaactaaatgtgagaacaaagggcaaatgccaataatttcggtctcactaaaaggggccgatgttagtatatatctataataggcaacgtggaatagaggcgttaacttcttcccgaatattgtggcgttgatcaacactcatatcccagaagacctttgcgccaagactatcccctagctaaataccaggcacttgctcccacgcaacgagaccaggaagccagcgggtacaagagcagagctctcttgctcctcttccctatatcctaggaggcggggggtgacttccgactgcttatcggtaagagtcttatatgctactagctcgggcggagtccacgccctagcttgcctagcgcgggtagtataatcgtcaaactctgtgcccaggtggggcagttgcttatatatcctaacgaacgcgattttgctagcatctccgtgtttgttgcactggtacttgacggaggcataggagatagcggagtggtcgggattttttcggtgctcgtgttcgttaacgcgcttgaggacaatccagcatcgaagacaatactacggagctcggggccccggaaccaggaatgctgcgaagtcatttcaattgataagactgaaggagcagggtacggaaacataatgatggcatggcgaagagggagcaagttgatagctaagtgatgtaagagaatggtgaactttatttttggcatcgtgagtgagaataatctaagagagtgttcagttggttaacttaagatagcaatacttcaatatgctggcaatcttttttttaagttatttctctctctcagtactataaaagaataatgagtagcagaacggaataggtacgatataaaatggcggtaaatgtcataaaccgtactccgtacagaggactttctctatgtagacctaggaataagctataatcctttgcttatttcgttaagtctccagttaagatccaagaggcacaaatttcatggtcaccaagctacaaaaatgcaacgaacacaaggtgaacagcaaatattgatcttctcagatgcatcactttttggtaaaaagtccttggctgcaagggagggacccggcctgaggcagaagatcacgtgtatatgactaacccctccacagggccaatcagagattgccccccgtagaacctcacccattgtggtctttcgtgcttcgaatctttgttttagtctcttcacatatcttgcacttctacagctattcccatctcctccagacctttccacccaattattgtgtgttgaaatctgggcgtgcactcaaggcaccttttcctctctgcttctcgtcgcggaaagacctagtgcatgccgcctcgtcatatccacaaaaacacccgtcccttcttcccactcttccacaggaaatcctctttccaccactgcttctatcgtggtgatcagcgagtgttgaacccttgattgatccgggtccagaggggttttaaagtcttttttctaatctcttctccacctcttttttccgtcttttttctccccccccccccccacatccctcatttctttgcacatcatggacgcccgtcaggtgttgcagagtaccctcgcgccagatgcggccgagcgtagcaatgccgaacagcaactcgcccacgctgcggaggttgacttcgtatgtgtctcctcttaccccccttcgtcctgtcacgagccatgaaagatttccccaggattccgaatactgatacttttgtcgcctgataggctgcctacctcatcaccctcggtcaagaactcgccaacgaaagcagccccgctcacatccgtgtggctgctggtatcgctttgaagaacgctttcactttccgggaccaagccaagttgcgcgaggtgcagcttcgatgggcccagagcatcaacgccgagaccaagtcacaggttaaagagcttgcgctcaagaccctgcagtcacccgatgctcgcgccggaaatgctgccgctacactgattgtttccatcgccgccatcgagttgccgcgtggtgagtggcccgaattgatgggcattcttgtccaaaatgtcgctactggagacgacgcactgaagcagtcatctctcactgccatcggttacatttgcgagtcgcaagatcctgatctccgcgccagcctgacacaacactccaatgctatccttaccgcggtcgtccagggtgctcggcgcgaggagcagaacatggatgttcgttatgctgctatcgccgctcttagtgatgctgtcgatttcgtgcgaaccaacatggataacgagggagagcgtaactatattatgcaggtcgtctgcgaggccacccaggccgatgaggtccgtgtgcaggctgctgcattcggctgcttgaaccgcatcatgggatcctactacgagaagatgcgcttctacatggagaaggctctgtttggcctgagcatcatgggcatgaagagcgaggaagaggaagtcgccaagctggctattgagttctggtgcacagtctgcgaggaggagatcgctatcgaggatgacaacgctgaggtaattaagcgcataaggctgagtgaccttgaccatgtactgatatcatgttactttaggctcagcaagagggcgttgaggctcgtcctttcttcggatttgctcgcgttgctacccgcgaagttgttcccgttctgctgcaatctatgtgccgacaggacgaggacgctggtgatgatgagtacaatgtctcccgtgctgcctaccaggctatgcagctttacgcccagtgtgtgcagggtgatgttattcagcccgtcgtgacgttcgtcgaggagaacatccgtaatgaggactggcaccgccgtgatgctgctgtcgctgcttttggcgctatcatggaaggccccgaacccagtgttctagagcctctgatcaaacaggccttgtctgttttgcttggcatgatggaggatagctctatctccgtccgggactccaccgcctacgccctgggccgcgtgtgcgactgctgccccgaggtcctcgatcccgaggtccacctccagccgcttatctcttgtcttttcaacggcctcgccaactcccccaagatcgctagctcctgctgctgggctcttatgaacgtcgcagaccgattcgctggtgacgatggctcacagaccaaccctctctcaaagcactttgaagacagtgtgaagtccctactgaccgtgaccgagcggtatgttccctaagcgataaccctttgattcctttcatctaacgcccgtacagacaagacgccgataaccagctccgtaccgctggatatgaagttctcaactcctttgttatgaactctgctaacgatagcctgcctatggttgctaaactctcagatgttatcatccagcgtcttgagcacactgttcccatgcagcagcaggtcgttagcgctgaggaccgtattctcctcgaggagatgcagaccagcttgatcagtgtcattctggccatcgttcagcgcttcgaggccgagatcaagcctcaggctgaccgtattatgagcgtgctgcttcaagtactgactacccttggcgcaaagtcgagcgtgccggatgtcatcttcgccaccgttggtgctattgcaagtgctcttgaggatgatttcatcaagtacatggattcatttagcccattcctgtacaacgccttgggcaaccaggaagagcccggcctctgcgctatggccatcggcttggtcagtgacattgctcgtgctttgaatgagaaggtccagccttactgcgacaccttcatgaacctcctgctcaagactcttcaggtaagattgttccttcatatatatcgagcttcatatatatcgaggttgacgtctaatgctaattttacaaacagacttccaccaaccagctcaagcctgcgattcttgagaccttcggcgatatcgcccaggccatcggaaccaactttgatacgtacttggcggtcgttggccaggttctccagcaagcctccagcgtgaccaccagctccgacctcccatacgacatggtggattatattgtttctctccgtgagggcatcatggatgcttggggtggtattcttctgtcctacaagggcactccttccagtacgttactcttcactctccacacatacgatctcaacatgctaattagcttgcagtcacccaactccagcctttcatcgagtctatcttccagcttcttcacattatctcccaggagagcaaccgcagcgaaggtctgatgcgatctgccatgggtgttattgggtatgtcttgccggcttctattctcgattaaatatactaactattcaatagtgatcttgctgatgctttccccaacggagagctcgctgtttacttccgcaacgactgggtcacttccctcgtgagagagactcgcacaaccagacagtacagcgagcgcacaattgagactgcccgctggactcgtgagcaagtcaagcgtcagatcaacatgggcgctggtatgtcgtaaagccgtgattatgtcttacctggttgattgccactgattctggtccggtcccgtctgccaaagcatctgccacccacttcgggcctgttggtgtcaatgccacaggtcctagggtcgcttgagcccacacccaatcggtgctcctgatgtgtacaggatagctgttctattctcgacgttgtcgtactgaacgcttgggcggtagcctcaaatccctctcccctttatttcccagcacaggattcccctcccataactccctttggtcgcgaactccgttcccccatacctttgctgctgctcaattcccttatgacacacattcgaatgagtaacctttcccaatccctgtacggccctgtctgattttcctttttcttcttgatacaaccctttcaccttttcatctttcccaatccccttctatgttgtttttaattagacaagaccccgcccctcgcatattatagcattgcgaatcatgtagcccaagaattcatgtatcccctccccctctactgtgctccccattcatgtatcctttcccctcatgtcaccccctccagaaaagagtcattgtcatgaaaaagctgtccctgatttcgtctcccttcctcgtatacaccgatatttgcccacaaccatgctatcaagctggaaacccatgtatagaaccgcccatctgaatctttcccgcggacggaataagtgaattatgctgctgatgagttagtagtagtaggagtaaagatgtttgtatcactatctgttttgatcttctaatggtgatttttttctttttttcgagctctcattttgcttctatactttgtattatgtaggtacaatctggagttccagatatattattcattgtagttatctggtacagttcactagttaacagaatagtgatgccttctaaccttcgaaggttcaggcaccgacatgtagcagcttatcaccacgtgaccattttctgataagggctacctcacacacaaaccctacccgcgcaccacccgaaaaccaaactttcaccgatcgtcagattcttccgcttcaaccatcgacgaccatctctcgaggtatgtgctatatcctcccccaacaacagccttccagctagtctggggatgcaatcatcttgtctagattgcttccttttgaattatagacaattctcaggaatcgcgatccaggaagccaagatgatacgcatctcccaactcggcacgggctgaagaactccttgcaatgcaaaaaaggggcactctttgcgctcgaagactagtggtggctgacttaaatcgccttcgtcgaacagatacctcataatccttacttttaaacgttacgatttgagaatctcgattctactaaaccgtcaaaatggtcaagacctccgtcctcaacgatgcgcttaacgccatgaacaacgccgagaaggctggcaagcgccaggtcctcatccgtccttcctccaaggttatcgtcaagttccttgctgtcatgcagaagcacggtacgtgaattttgaaattttctcgtcttttcatttcttgttgcgtttttgtttcctatgacctgtcttgagaatatttgtccccccccccccccccccccccccccccccccctccccgccccccgcccannnnnnnnnnnnnnnnnnnnnnnnnnnnnnnnnnnnnnnnnnnnnnnnnnnnnnnnnnnnnnnnnnnnnnnnnnnnnnnnnnnnnnnnnnnnnnnnnnnnnnnnnnnnnnnnnnnnnnnnnnnnnnnnnnnnnnnnnnnnnnnnnnnnnnnnnnnttgttagaatttttgcccccccccccccccccaattcgggctgataactaggcggccggtctcaatcaacctacgacgtctgccttttaagtgtccgatatattaatttgcgaagatcttacacgtttccaaagcgctgttatggctttttctgtatttgacgacttttaaatcttcacaacatactgattctttctttctcaggttacattggcgagttcgaggaggtcgatgaccaccgctctggcaagattgtcatccagctcaacggccggtacgtttcacgattacatccaccagtctccatggaacatcaagctaatgttatatctccagtctcaacaagtgtggtgttatcaacccccgctaccccgttcagctccgtgacctcgagaagtgggctacccagcttcttccttcccgtcaattcggttacgttgtcctgaccacctccgccggtatcatggaccacgaggaggctcgccgcaagcacgttgctggcaagctccttggcttcttctactagatggagtcgttctaaaaaagaattgagaaaaagttcttgctttgactggtttcgcatggcgttggttttattgggctggaccctggaatgtaatctggaatttgtagctgtgaacaaaataccccatgttccgcactttcgatggtttgcatagtacacggttcgctcgtatcaatgctagatgattctggtctgcaattttgtacttctttttcctgattttatcgtagcctggctcggaccgaggtgtactttcaccgccctcgtgtaagtgtattctgcctttcccccgcaacaacaatatcagtactgtacatagttgaacaacccaagaattctttcgccatgcctttggacacgatatatctgacccgtcatggagtatgtctgcatacaatcatcactgcgggcttatagacctaactatggcagcaccgcctcagctggaccattgacttccgtacaggcacatacagggcccaattccccacgccgacaggaaacccagcagaccctgcattgacctcacacggcgtgcgccagtcacacgagctggcggaacatatttctgcaccccaattccacccgaaaccattccgtatctactcgagtcccttctaccgctgccttcaaacaatccagccttctgttgaagagctgaagagaatatcagccgagtctggaaggagccagcaagatggcgagattgggtcaattgatcggcatgcggagcttgacgtacgaattgagaatgggttagggtaagtaatatacctataccttctttatacttatacttccatccaatcactcaactatttccctctcgtccgaacaaaagaagcactttaccagcacattgctatccaggaagctaataagaattcagagaatggttcggcgcaacagatttcttcgaccacccgtcccacccaacctccgagataatgtccacccacttcccaaccctcattccagaagctagtcaaacctacataccactactcatcccttcaagacgtggcgagacaatcaaacagctccacaaccgcctagcaacagccctagaaggtataatcgccgacatcgacgcagaagtctccgctgtggaagcagagctgccaccaaaccaaagaaccagcaaggccgtcctgatctgcgcgcatgccgcgccgctcattgccatgggccgggttcttacgggtcgcatgccggatgatagctctgaagaggactttaatgtcttcacagctggtttaagtacctttaaaaggaggggggcttcttctactgctagtgctggacacggcggtgataaggaagaaagttcgagtgagaagccgcttgccgagggcacgacgttcattcgtgcgtcggtatccccgccgcagtggagaaatgggcgtggtgttggtggaggatgggattgtgttgctaatggggattgtagctttttgagtaatggtgctgaacgtggatggtgagtcgatttcttccttcccttcctttggtattgagagacaatattaatagaccccggcaggcactttgatggcgaagaatcttttaatacgggtcctatggctctgccttccgatctacctgtgaatgtaggtgccacgaaactgtgagtgaaggatttgcgcaactatactgtgcccgtgggtttggcgaacataacgatgaggtcattgcatcttggatcatcaagtactataatatatatatgactccgaacaatgactacaaaccggcaatttgagctgtcatgatctatcactagtgtaagagaaatacatatcaaacttagagatgaaactaagacttcttgctaaccgcttacgactatttacgatgtacgatgtaagagcatctagctcaaaacgacatggacaactgacttgaaaaagaccaattctgactaccttacgtacttgatttcgtggctggcattcttgtgggtatcactttggccctcgtcgagttcaatcgcaaaaactacattgaagacgctatcgctaataaacgagaatataaaaagtacctccaggtatagatcagttcccttgttcagactgtgcatgcgtattcgagaccccctcatgttcagtacctgcactctccgcaccctctggcacaccaggttgagcccgttcctgttcctggccctcctgctcacgtacctgctcctgctcctgctcctgctcctgacgttcccgcgcctgacgctcctgttcagccaagaaagcttggtccgccgcagtgcgagcctggacatgccgctcaccaagaccgggaactagactcgcaaaaagaaaaacaagagctcgctccgcgcggcatatttggtcccaaatgctgaactccgcagcagcgttattggctccattctgggtggctcgatctgccgggccacctgcatgggtgaggccctcgagatgtcgttggatgggaccaataatcgtagtcgcaaactgccgcgggatactggtctcggaaaagaatgttaccaacagggcaatgctgacgaaaatgtaacgcctccaggtgccgggcgcgctggtgaggtagcagaagagccacagacgggtgaacagccagatgcggcggatatgtcgcgccagaccggcgtgctcgacgttgttgcctcggcgctgctggttgagcattgcttggcggatggcattctggaccactgctgcgttttgattgggtgcttgaggtgcctggggtgcgttgggtacttgaggcgcgccggtttggttagcaggggctgtattgggcgagcccgcctgctgcgttctggggcgggctacacagtttggtctcacgagaaggttttctcccgttggcgaggtcagcatgaagagctgagtggagtttggcgcgagggtgttcaagacatttgtttgggtagcaataggggcctgggctagaatgcttgcctgcgaatgctgttgctgcatatattccattatacgggcgcgttgttgaacatcaagaatacgggcaagtagttctgcaacaccgggcagaggaagctgtgtcgcaggccgtgcatcttggattccaagaatctggttccgtatatgaatgatactctccatggatggcatgagacgtcggtccaattgtccctcaatctcctcgatgtaacgtcgtaaagtgagaatacgctgagatgattctgtactatcagcttctggtgcgtttgtagttgctgagtgtcggttaggcaaagaggtattgacgtattgattgattatcatgtgcggagaagctgaagcggcaccgattgttctaggaatgctagagtatgaggacacactggctgcaggcaccgaagtatcgggattggagtgatccaaccatgtggaggaggaaccggaatcttgggcagaatttccgaaaggcgaatcttgcggcatctcagagacaataggtacttctgtgtgtgctggttcaggtggtaggacgaggtgcatactatcagtgccttcctgcaaaataaataccgttcagttaggataggccatatggcgcgggttagaaacgagttacttacctcgatagatgagaccactaccccgagtgttgcgtcatcgacagttagaggcttccctcggtagatgagcctctggtgtgatacttgagggttgttcggaaaagactgttcgatccggctcttgagctgtccgactgtggaggagagtggaacgttctcgagtgtgaaccggcttggagggggtagagactggcagagtatgtgaagcgtgattgttctgggtgtttctccctctactataggctgggatggtagtcctgtcgccattgcttcagatctgtggttgttcgcaagctaaaaaaagccaatataaagcggatctagttgctgatatctggcatcaattgatagtccacgggtgttttctgcgagactctatagcagataggaaggacgtgggaagaacgatgcaagatgataaagatgcaaagatcaagttgcaggaacgctcatttatactgaaatgtatttggatatacagagcagagagaaagacagtctgttgcatttccacgtgcgattctgccgggcggtcaaccggtaacaacatgttttccccatttcggaaaaaagcacgctctgggcttaggggtcgattttagcgctccaggccgatggattaaaagttatggccaagcgcctctttacttcttcacctctccttcattgcccttccgctggccctcggatcggggctgcgtcgatggaggttctttcatttcgggctacggcccgccataaagccagcctccgacatttttcgtctaaatcatggagacaataccagaaggataataactccgaaaacaatagaggaggatttggttcaaggctagggtttgctctgcgcaataccaaggtcgaatggtatcccatcccagtcggactcggaatcggtttactagggttgctgtcgttctacaagtcacaacgtgcggagcgggatcggttggctcgtgatgcagccggcgatgaatgggaagaaggaaaacggccacctcgtcgtccgaggatcagtctgtcaggaccatggcatattcagatcatgtccactctgcccctgaaggctatgtcgcgtctatggggtcggttcaacgaaatcgaacttccttactacctccgcgttcctggattcaagctttactcctgggcctttggcgtcaaccttgatgaggtcgccgaacccgacctgcacacctacccgaatctggcggcattcttctaccgtaagctgaagcctggcgttcgaccattggaccccgaccctcgtgcactcctggcgccctccgacggccgaatcttacaatttggaatgatcgaacggggcgaggttgaacaagtcaagggaatgacatacagcctggatgcccttctaggagcagccacgcctgcgaacgccgaccacagcaaccgactcacggaccaggacctgaacgaagaccaaaaggatgttgagaacatggatgcgcatgaggagtttgcgcgcatgaatgggatttcctacactctcccgagtttcctttcgggagactctgatgctcccaaaggacgtgcttcattggatgcttcaaccgcatccaaagcaacctcggaaatgcttgtgcaagaggacctggccctcggcgatggaataccatggtacgcgcccaaagcagcagccaaccatgccttgttctacgttgtgatctacctagcacccggtgactaccaccgtttccactcccccgctccctgggtggtcgagagccgccgccactttgctggcgagttgtactcggtttcgccctatctgcagaagcacctacccggtctattcactctcaacgagcgagttgcactcctcggccgatggcgctggggattcttcagttacactccggtcggagctactaatgtaggctccataaaaatcaactttgactcggagctgcgcacaaacagcctgttgactgataccgctgcagacttggcagcagccctggctgccaagcgcggtgagcaatatcccggcttcgtggaggcgacttatcgccacgccagccgcacacttaacggacatccactgcaacgtggagaggagatgggcgggttccaactcggcagttctattgtacttgtgtttgaagctccgcttggaactcacaagtccactgatgccggccggccggaaggtgcccccagtgatgggtggacctggagtattgagaagggccaacgcatcaagataggcgagaaattgggctttgtcggtgaggcgtaacgtacatgatgttgcacagcccggtgcacagccgacagcagtaggttattgcctcttgacctacatgtttgtctgtcttgtattataccagtccttctctctatgttaggatcttgatcatttagtttaatcacattttttcccccttcgatctatgtcagctcaagtgtatcagcgtgcatatttcctaatgtatcagcacaggccaggtcgtggcgtgatggtcccaaatgcgtcattgccgatcccaggctctagcgtgttgcacaagtaagaaactatgtaggctatgtagtaatgttgagggtaaagctcgggatgcgatcggcttcttgagcattcgactcgattgaaacttatgctaagtttcttaactagtatgccatgccattgatagtcttctcgggtttctagatagacggcggaaaaaggctcaacttgtgtagacgacttctctttgtataactttcgactattatatagttactgtaaggttattactagcagttaagttaggagaacgtgcattgagcgtggttgggttggaggaggatcattggtgcttctgtcgacaacactgcggccccttgctgtggcatagtggtccatcgggcccattgcatcttaggatctagaagcaatctttgcacccacgccctttttaacgtggtgatggacatttttattcgtggccttgaccttctcggccttgtcgatcgcacctagacacgttctgccaaatcttgcaatacatacatactagcatcggggatgtcaatacgaaatccgtctccttatcctggtatatccaataggatattcacggaatgctagcgccgtatctccctctcttaaaaaaaactctttaagccactcgaggtggagattgagttgactagcgaatactctattagagatataagagaaaagtgagagtgagagaagaattacaacagaaaatcgataaaaaaaagaagagatatgctctcatttcactcttcattctcactttcacttgaggtgagaaaattcacgtcgctttgcctttctattgtctggtttcggggggttgacgttgattggttgtgcatcagaatatggagacggctatcccgtgtgcgttgagttgtccatccatcgagcactggcttcggtggtcgccccctcaatcagggcgagggctccgacccaaagtcacagagcgatgctcctgggagatcaaagcctccgattgaagtgtgctgccttttggtcggaggttctcctaagcttgggcgaagggggaaattcaccactacctgagcttggattatcatgtgccagcatgtttgcaatttcttgccagccgaacacatctggggcaatctcatctctcattgccgcttaagcttcgtggcacgagatgagccccacgactaacaattagtcgagttccagcatagtttaaacgccattccaccatgacaaaaccagatgcctgctaatatatatgcatgaaactaacccatgttataaacggaaaggccgatctgtgagatccagcgcttgaacatgactcttccgagtggcgtcgtcagtccatctgccgccatttcggcagtagggatcttcatgaacttcaccgagccctctaagcccgtgaaaacggattgcaatgtttcgtatttgcatggaactcagggtttgaagcaagcgcaattgctcattgttgtcggcgtaaattggagttggtttcaccaggaagctgtcgataccaatttcagaaagtagctgtgatagccagattgcttcctgaactgctagtacttctgcgatgtattcactttctgtagtagacaacgctacacagggttgctttttcgatgtccacaagattagaccaacctccattttgaacgcaactcaagaaaatgatacttggccacatgtctcttaaaactggaggcgttaaagccctgccccagagccttcttgtctctctgctgtttaaccgtagcattttcaaggaccaatttccctcaaagtcaaggaagttaaggcgaaactccgagccatcactgaggtatccccaaatggaccaatttgactggccacgggccttttgaaatgatcttcaacaccgtcagtggtatggcatgccatgggctcaacaagaacctcatttctgctttttggcatctttgaatccatatgttcccctggagaaggagggtgttgagtatagattcgggcgttggataacgaatatggaccatataacgggagtttcgaagatcaactctgttcaaaacggaatctagacactacttttgatcagtacctgctttctatcaacccgaagaggacagtgtaatcggcggttccaatgcatgtgtactgaactccataaatggagtctcaggtgagagagtggctctgctgtgtccggtgcttggaagtatggaaggagttagcccaaaaaggactagttgactaagccgaagtttatttcaaggtttcctcccttggtgacgtatgctgtgcgcacgtgataatgcaatgactcagctttggcaaaaaggcccggagcttggatcgtccattttcggctgattgactgtcaatcagtgttgtggcgtagtcaagtaatagaatccaagaaccttggaatagctgagtttcagctgcaagtatttttgccattaatatctcatacgtcgcttaatccaatgaacacagggaagagataagaccagaactatcaacgtaggaccgccaagcttccatatctaaatcaacaattccaaccttctctccttctaactttttcacctgttcctgttcccatccacaatcttttcttgactgatggccatctttaactcgcctcgatcatttcagaatgtcaatgctattgcccaggccccaatgggcatggaccgcttcttcataggcgctcatgaaagccatcccccattctttcacctagtgctactcgtcttttcagcagtactggaagtcgtctgtgtcagcttccctggttatattgccgcccgtcagggcatatttgatgccgaagctcagaagctggtggcaaacctcaatgtcgttctgttcaccccctgccttagtatggattcttgctttcgccacatatttctatgacatagctgattgtggtcaacagtttttaccaaattgggctcacaattaaccgctgaaaagcttacggacttggctatcattccggtcatttttattgtccagactttcgtctcatacttctgttccttcattgtcgcaaaatgttgccgcttcaagaagcgacagtcaaatttcgtggctgccatggcggtacctaatgggcccttccattgagacagtcgaatatcttgttctaacgataccttctcgcaggtatttggcaattcaaactctcttcccatctcgctcgtcatatcgctctcgcagaccctcaaaggcctccactgggaccagctccccaacgacaacgatgacgaagtcgccgcacgcggtattctatacctgcttatcttccagcagcttggtcaactcgtacgctggagctggggataccacattctcttagcgcctaagcaccgatacctcgaggaggtggaacgcgacgagactggtcagtcaattatcgagcagggtcaggcgctgtatagcgacaacccggaccaaaccgatccggacgaaccgctagtcagaacacggagctcggaggatctacaccatgttcacgacgcgacaaacaccgaccgtccgttcccatccggcgaccaaacacccgtgtcaacgcgaacttattcctactcgaagatgtcccccgccccctcagacgacctggactcagacgacacaccgtcagtaattggaccaccacccaccggccccttcctcccccgccaaagctctcaaggtgacattctccacttcccggatgtcgaagtcaccgcgcgcgaagttcaagaagccgagaaaacgtgtttccagcgctgcaaagcatctctgcgtaaatctggacaacgcttgagccagtggcgagaaaagaaagctactgccctccacgcaagcctcccaccaaacgtccaaaagggcatcgcagcaaccactcgcggagcgcgccgcttcctcaatggcttatgggatttcatgaacccaccgctgtgggcaatgctagtatcaatcatcattgcctccgtcccaacgcttcagcgcctcttctttgacgacggcaccttccttcgtaactcagtcacccgggcaattgagcagaatggacaggttgccgtgccgctgatcctggtcgtgcttggcgcgaacctcgcgcgcaatacaatccccgaagaagcgctggcggacgtggaacatccccgcgacgaacgcaagcttatcatcgcttcacttgttgcgcgcatgcttcttccgactctgatcatggctccaattttggcactcatggctaagtttgtgccgatcagtattctcgacgatccgattttcattatcgtctgcttcctactgacgggtgcgccgtcagcattgcagttggcgcagatctgtcagatcaataatgtttatgttggcgctatgtctaaactcttgttccagagctatgttgtctggtatgttcttatccctcctatctatagacagacaccgtctggttgtcaatctcaattgatcattgctaacatggcttttcttccaggatcctcccctcgaccctcgtacttgtcatgtgcgctctggaggtcgtcgagtgggccgccgcttcatagactcttgtttgacgtctgaaccggaacggtgaagctggtctttccttctctagtccttttttcggggtttatattcattctctgtggacattcttataaccccattcctttttctcttttggggaattggcgttacctaaggcattattcctggcacacaaactgtacttatgaattccagtactttgaccttgctataactaacgtaatcggtaagcgaggcggccatgtaagcacgtcggccacgcaacccaacccattaatttcaaatacatttatctcaactgaaacgcccattgcttccatctgttcctaactcaacgatcctcataccatttccttggggatatatatctacccaaacagtctacacgcccaagtctgcccttattgatagcatgcgtgaaatcattatcgagtctgactgagaatatcatgaaagccctcactagctgggttcccatcagagacaccgaaaggttcatgcgtgtcgctaaagcggaatggaaagtccatcgtcgcaggaaatccccttttattctttctcgagttaaggcttcgctcgcgcgtttgtcttcgaccttatttggctattttcttcacggccaaccccactttgcactaattcgccctatgggtgtgtataccctaatgattgcaatcgaagcctagtcgtcatgcaccttgaccacgaccttgccacgcgcacgctttgtagcgatgcgctcgtaggcacctatggcatcctccatgtcgaagacagagtccacagggatacgcaagcggccctcctcgatcagacgtgctaagtagactgcatcgtcacatgtcggaggcgtgctgaacgttatatagcgacgcggcacgccgcctagccaggtgggcagccaggtgttaagcaaggcattgcgcgccatcgcatacatgccctcgaacgcgccgatatttacaacagctccctcgggctttagataagccggggagccgacaaaaagtgcttgcgtgccaacgcaatcaagcagaaagtcaaacggcttgtcgccatactgctgcgctaggtaggctggcagagattcatgctcgcggtagtcgacgaactatttgtatgttagtcacgactcatttttttatgcaacgttggataactgtgcctacctcatctgcacccagaccacgaaccatgggctcgttacctccgctagccacgccgaccaccttcgcaccacgcaccttgcacagctgcacaagcaccgaaccgactgacccgctagctccgttcacaagtaccgtgtgaccctcgcggacacccgctgtgcgaatcatcttgagcgcggtgctaccggccccgataatacccgaggccgatgccatgccaataccgccatcgatccgtgcgacctggctgccaggcagtcgcacatactctgccagcacgccgtggcccatgatcacagcgctgggaatgttctgaaaggcaatgacgtgtgagcccggatcgcgcatctctgtcggtgcacccccgccagccgctactaccacgccggaaaactcaatctccgggatccacggactggtgaaaggcagtataggcagtatcttcattatcgcctcactgctgaactgtagggacacgtgtgacacgcgaattaatacatcgggcgacgagcctgtgggcacttcgggggttggatagtcagtgaccagctcgagcgcgtcactagcaggaccgcgtcgccggcgtacccaggcacgcatggttggcgggacggtcgggagctgggtcgacgacattccttctgccattggtgcgtaggaatagatggagaagaggatgattatgatagaagcagacagaaatgctgtcgacagatccgaaagccgctgtgagaaggattgggcaattcaaggagaacaagtgactgtcgagcctctttgaggtagactgatggcacagcccgagaatgtgagaaaggtaggggttcctggaggttcgccgtacgcgtcataataaatgattggtaagaaaaagcgtgtaactaagccttaactaggtgtatcgcaatgactttgtctaatgccaccccgtttactccgtagtcaaggacttccaatgttgacggtatacgcctaggaaggccttcgatatgtgcgcttatcagaaagaaagaaagaatccatcagtcttagtttagggaatataaattccttcagtttatctccagggcaagagtgtaggtgtccatcctaagaacaaagaagtgggcgtgctcaggtgtactcaagcaaaaagcggcaaggcatgagcactaatgcggaaagagggagctatacacctgtaggtataacgtttgataaatcaatagttctagttggtttaatatcatgtcactctgctctagaactgtagcttcaatagcaagcaaataccaaggcaacagtaagaaagtcagtgaccggattattgcacattcttaaaacaacgttcaatgatgtggtcagctccgacacagaaagaccagtctaagaagtgaccggatgctggtgcaaaatggaagaacccaatcacatttccatccttaacccagattgcagatccgcaaacactatcttggagactttcggtggacccttgacccatatagcaccagcgagtcttgatccattcgaatgaaggttggctagggtcagtacagggaatttgctcacgggtgtgaggtccacagataccttcggaataaccaataagatggttattcatatagaccgtatcaccaggcttcaagctgtcagctgtgacgagacttcgtaactgggtaggttgtattccgttgaaagggctctcgaaagtgtcatttacatacgggacatcatcatgcaattttgctatcgcgatttctgtatgtgtgatcttcataatgatttgaccgatctctttaccgctagcacatggatggaaaacttcgccgccatgtggaaacccatgggaagcaacagtggtataccgctcgccggagttagagttctcaacaagtacaccagaagtagtaagatacccaggttcggtgggagaatatatactagagttcaacataacgccgggacgcagtatatcatacttgctactatcaacaatatcggcagtcggttctgtgagcctgccttgtgtcggtcgtcgtacctcctgaacaaacagataaaaacaggtacagcagcctatcgaacggggtacttcagtcaaatcagtatcctcatcctccagtacaatcataaacaaattgccccagtactggacttgggtaatagagatttgagcttccataaagaaatcgaagacgagcttgaatgcattgtcaacttgagagggtggaaggtcggtaacgttgatttcagcgtctacaaaaagacgcgatttgctcgtacgtttcattgatggcattggaccctcatcattcgggtccgttgtgaaatatggccggactcaagcaatggttagcggccacggctttgggggcagagagcccagcaaaaacaccaagaaatagctatcaaatagaatccgcttcgtgtcaggaaacagttgcataagctgagcagaatcgcggtggaaagttcgtttttcacgcaggttgaagggtagaatcacatgtctagatggtggaatcagcttccttagcatttcggtcgtcattttagaggaataggatcacaactgaagatgaggtgattatgtttgagagatgccgttggtcacgacaaagcccagctcctcgccgataaccaggttgactcgtgcgttcgggtcattaggtctagtgttgtctcaactggttgtccaacttggctccgatcgcctatcttttctcagctggcactccggcagacccagcaaaacgacagatgaaatctgcaatggtgagagataaagagtaaccttccgttctcaatggggtaatgtgagagcgacgtcaagtgctgaacaaagatccgctttttatagtaacagatcaggtaatctatactgttttacagtctagttttcaaatacgcttggcggtcaatgattccattagatcctaggagtttctacttatcagtataaaagactatgttgtacttcatcaataactgcttcaaaaactggtcctttggaatggcccttaaatgttcgcagctccgcgccggtctgggcaccccagaccgtgatggttatatttatattttgcttgacgagagctcatctcagtttctaaaggcttccatgatgctatggctacaactgcatatagcatgtcgaaccatccctcgacttctcttacattactctcacttatgaataccccaccttcgactccagacgccgttgactatataaaccaccagagaccctccccacattttcttcttcgccattcacccatctccactggagatttccttcatccatcttcccatattggatatggtgatctcagcaattccacgagaacaagaaccaacaagtgagcggaagcctgactgagagaactagacaagccaactttggcgatgtctcttcttcagcaaccgcaacggacgagagagtctacgcatctagcggaatgacaattgcaaacgatgacagcgatgaagaaagaagatttgctggattagcgactccctctcaaacgaaccaacacgtcgacttcgcatactggaggataggatatgcggactatactggttgggcgtgggcttgaccttttgctggtcgggcataggctcaacgtgttgttcgtcaggtacagactcaaggtattgggtgcccggaaggcggacaccgatgtgggtccagatcagtagataattccgctcccctcctcttctctcttttctcctctcgtgcacttcatcttagtcgaatcgatactggttgttttgctcatagcagacacaacgtagatagatcgccattacaaggtgctgctcatcaggcacggattcaacatcctccttgttaggcacggacttagcgtcctcccctcggctactgcttattggcaagcgcttgagtcatgccacaagacttccctgatgcgcgcattagaaagattgatcaaggatttacatgtcttcctatccgcatctaggattggcctcccggaatacttgactggacgtatttgcggcggaaagagctgttggtgcaaatatgccatgacgaacctgagtccagggttatggatatagcccatgtatatccagtagctggtagctacaaaacgccaatgtctgtcccatgtctgttccctcccctcgccgtattgcgcgaggttgagtctgtgtatgacgagcaggacgttgagtctatgcctgacaagccatagagatatcattctaccaatccaaaggccgaaagagcaactgcgaatacgaacccgtcaacaaattcaatacttttgctattttaggtatagtttaagtcaactgtaattgatgatgtttccccatgattcatgattacatacagcactgctagaacaagcttctaacaaagatcacggtgaaggctgaaaggtattcaagttgtagcaacgcttggctagaaagaaatgagatcgacggaagagcagcggttcctttcgcaacagttccaggttgattgaatccagaatcattactaaaaggctagtttaggattgacctagagttctaaggcacaccgcatcccgttaagcgtcgaaccgggtcatttaatgtaccgtggaccatgctgcagcttttagtgcagaagcggaacccgtagacatgaaacgaacttcatgaagaaacgttcatattgcagacaacgggaatgcggatatatcgtatagaagtctttataagtagtggcactttgcgcctaggactcagattggttcgagtaccgatcgaccaattttgtaggggtgttgttgatcttccatggggcttccccaggttctctctctggtcgtatttgcataagggaatacctgcaaatccacgtcagcagagtcaatatgagcagattctccctcaaacttactccgcgaaaaatgtaaacgtctacatcatcatttccgatcgtcctggccgcccgagattggccctcttcaccgatgaaccgaggaatctgctaacccgcagaatcttcctcgaggaccgtatcaactcaggaattcatttccatctttgctagtcggcacgttctgaaccacgggaccgagacgtcctcatgccactcccgagtgaatggtcaatttgaatgcaagactcttgctgcgcaggaatgtgtaaaatccaatcgaacatccaaaacagatgagcaactagggtctggagtgtatgtgttcacaaggctaatcccaagccaaagctaatcaactcctctcaagcaggacatgattctccgctgctagcgtgcgcagccaatcccgccggatcgccctgcacatcaatgaacatggccataccagtcatcgaatgccaaagcatatggcaatgcaaaagccaaacgccggggttatctgcccggaaacggagaacagcatagcctcgactagggatcacgactgtgtcacgcaatgcagcccgcgatgtgtcgtatagagcggaatcataattaatgttagggtcccggacgtcatccgtgtcatttttcaacgcatccgagtcgggttcttggtgtggtgggattttgtcgacgaagggattgtaggagccccagccaaattcggattggtagactgcgagtacgtagaagtggtgcccgtgcttagtggaaattagtgaattgtcgtcactggataagggagggaagggttcgtaccatgtggaaggggtgggatccttcatctaaattgttgattaccaggtctacccatataggttccggccccgtggttattgagaattgatttgcgtcccatttggctcgtggcatagacgccagtggaatgggtggatcttgctggggcttccaggtggtttggttgaagtaaccaaatggcttgttggaatatcgggccattttctggatcttggtgtacaccacgtgcgtttgttgagcggcgggcgggatggaatggagaacggagggcgcagaaggtacttctgcgatgtcgagacggtgggccttgattggaggcccctggacggcatcgggacggtagttgatggggaaagtttgatctggcgtcaatgctgggttggcgtacttgaaggaactggtgaaacattagcaactagtaactgctatgctcggcgagtttgtcatactcttcatctaactgaactgtcatgtgtgactgcttttcagatgtttgtgataatggccgaaggacaaagtctatgcgttgcccgggaaagagtgtaccgatggaatttatatgcttctgtttggagcgggccacatcgatgctatccacttgaagcaggtccagaagatggttgtcgaaaacgagattcagcccggctagagatctgtcaactagttagcgaataactaatttggctttgatgtcctgtgacatacccagtgttgaccacgcgaattcggtatgtcgcatgaggatcgaggtcgatgaatgcattattcatctgctgatcaatgcagtccaccggtctagcaggcaccgccatcatgcagttaaaataccctgccccattgatgagcatggaatcaggaacaggctaataccattgtcagatagacttctccaccatttgggaccatatcggaacttacctcgcttccaaaattcccagggtccatataccattctagaacatcacgcgcaggacgatggtaccagtccccgatgagaagcaaaagttctctatcataattgtaacggtgcagaccactgcgcccacgggatgctaagccccgaacggtggatttggaggctggtgcatgcacgaccagcccaccataaaggccatccgcccgcgagacccctgaatgggcatgataccagaaagtaccactctgatcggatggaattgtcaaattatacacaaagctacttccagaagtcacggggcattgggtaaccccggctgcaccatccatggcatctatgtgagttagcgccgatgcttccaaggtttaaatcgcgaaagacaaagcttactagccacatgaagaccatgccagtgaatcgcaatcaactcatccggcaaggcattggtaacagtgatgatcaatgtgtcaccagagcgggcctctatcgtcggtccagggaataggtctagtttgatatcctccggtcagatccaccacggtgataccaggttctgctactccgtactgaccgttgattaaatagacccgcttcaatacaccgtctggtcggcgcaagcccgaggtcacatgccaatccaagtattgagtctccggcgcccgatacgcatgatcctccgggtgaagctctatgcgcggtcgagcagtgaaagcctcatcttgaatgttttgaaggtggccgggtaaaatcaaaggcacaagaaagatgggcgattgcaaaaagtataccaagccgatcaagaaacacgcaaccaatgagcagcctgcgatcggccatggccgctgcgatggctccggcattggttgggccaatttctctggactaggggctgttttcccagccggactgtactgtttctgcattgtttgtaaagaactgggagtatcgcccaaattaccgttatatagttagaaagaaggtcaagtacggaggggaaagaacatcccgctaggacctcaggccacccttactgccggggatcaacgtgatgcgaccttacagcgagacctgcaagacacgtgcccggctggatcaatcacagcgaagggaaaataattaattgaaaagtaatttcctagggcatcgacgccataaataagggaataagacatgtactaaagggtgggtggcaccctggactaggcccaaagggtacaagatcgttcctgccgaaagtgtgttttgggttagcgttgggtcgaaccatggaacagcattcacgtggagacagctgcatatcagattggatcagcaaggcacatgtaccttttcgtccatcactcgactaacaacatgttgtatacgcatatgagtgtattattgtttatgcatgatcggcatgcttcactcaaatgccagcccatccctgtattcaaattcctcaattccgattcgttccttcctcgaacggtctgccatgaagaaaccgcgatgtaaccaaagcgtgtgggggcatcaatatgtacatacactatacacatgaaacggtacttcgcgaatctctccgctatctgcagcgtcgggggcacataagtagcgcactcttctcgcaggttaactcttccccttcattccttctgcaattaccgcatcatggctttcaaattgccggcgtctatcgcggtcgcgatagccctgggaacgggactcgtgtctggtggatctctaaaagacattgaacatgtcgtcatcttcatgcaggagaatcgctcgtgggacacggcacgttttgcctgcactatgaaacattgacatcgtgctcaccaaatcgcagtatttcggcactatgcctggagtccggggattcaatgatcccaatgtccaggtcaacccagacggaaactcggtctggaatcagtaagtgccgcctctaagggagaagttagttctaacattcctggtcagattagtcgagccggcccaatcaaacaagaccaagaccttgctaccctggtatcttggatatcaaggcggcgactggaatgatgcaattcagtgcatgtctgcgggtagcaacagctacgaggagaaccagcaatctctcaactatgggttgaacaatcactgggtgacaaacaacacaccctggagctgggggtatttgaagcggcaagatattccagttcaatttgctattgctgaaggttggacatcgggagatatgtatcaggtgcgtggcaagactcgttttcagaaattggtgactaatttacaagcaggaaagccaaatcactgccacaaatcctaatcgggttactttggtcagcggctccatcaacgttcctggtagtccccagagcaaggaccagggaggtgtttatattgacaataatgaggtaccaggtatgtatcgtcggctctctcttctgttaatatttttgatctaaccaaattataggctgtgatgacaacggtatcaactgctacccactcaagtggaagacagtctatgacttttatgaagaggcgggagtctcttggcaactctaccaagacacaaacaactttgacgacaaccctctggcttggttcgaccaatttcaaactgccccgcaaaacagttctctggctaaaaagggtatgtcgttcgtgggccttgattccttctaccaagctgccgccaacggcacattacccgaggttagtttcattgtcgggccggcggagctgtcagagcacccgccgtacatgccaaaggacggaggctggcttcagaagaaggtcgtcgatgccgtcaccagtagcccgaagtacaactcgacccttctgatgatcagctatgatgagactggtggctttggcgaccatgtcacccccttccattctcctaaggataccccgggagaatggatgcaggaccccttgggtatgttcacggatatcttcacaggacctggtttccgggtaccattctatatgatctccccctggactcgcggaaaccgtgtgttcaccgagcgggcagatcacaactcccagattctcttcgttgaggaatggttgactgcacggggatacgaaaatatcacaaccgatcagatggttgaatggagacgcaagcacatgtctaatctagtcaacgcgcttgatttgcacaatccagactactctctccccagtctccctgatgccgggaccgtggataccaacgccaagggcgagtataccggtacatctaactgccaggcacgttacaagcagacacgtccggatgttccctatggagaacagagcaacgcaacggatgtcaataccctgtggtttgaagaaggtttcaaagaggtggttggctacctcaccgagggccgatacctaacctttgagaagaatggagcagccctcacgaatccggccagaggcaacagccttgtgtccagccctgcaagccctcagcacaacaataaagcgcagcgttgggtgatccactacaacaatgacgaggaaagccagacatttaccgtctccagcgcactggatggtcgatgggtcggccccgatggtgttctgcttcccaaaagccacagcgcaaaggcagcccaagtgcatttcaccttcctaggtggtggccttggctataccatgcagtttgtggagaaggggcaatacatcgatattgacaagcacggacacttggatactgaaacccgcaagactagacctgctagtggctaccaggtcttcagcgtctctttccgtaattagatgattgtgatgtgatgacgatacggaatcttgcatgtgcatcccgagctgggaacgaaattatttatagtatcttctcatcaggcaaaagcctgaaacccaactaaatatacatattttccaataatctcctgtccacaccgcctctccaatcaagttctaaaccgagccgaagtattccataatctatgcagagataaccgtgaaaggcccagcagcgttgaacaaggtaggcatctgtataaaatcaattagcccctggagataaaccaaaaaaaaaagcaaaaaaagaaagaaaacatacctgcggcgcagtcggaagcgaagtcccaattctcaagtaccaaagcgaggcatcctcgacggcgggcaagttcttgggaatagtaacatccacaacaccggcagtctcattaataccgctcgcgatccggatagactggttgaaggagatggtgtcgaggtggcgcacggggttattgtacagccagacgttgtaggcgtcgccggggtactgagtcaacgggtccgggcagcggccggtgggcttgcggttgaagcggacgcgcacggtttggccggcggtgacggttgagttgtcggggatgccttggtagacgtttacgcaggcgtagtcgcgtttaccccaggctattgttgaggaattgttagtttaaacgttgagtatagagtcggaattgggattggaggtgcatacgctggtccttggtgaacaaggcggtgctggttcccgccagggcagcgatgattgcggcagtgaacttcatcttgggatttgagttggtggtttggtgattgatggtagaagagagagaattgtatggaaatatattcaaggtgagtcctgagaatcggcacttatataggaaataaatattttgcctgcaatatcgtgccaccgacgacataatacctgctaattatggattcgggttcggaaagccctgtctgcgaggtctgagtgatcatgtttcactcagtctctccacatcgactcgaattagaatcccgactgcttggcgtgaggagtgatcggcgtagccgatctccgtccggggaggagagtcgcaaaagtctcgtatatggtaccgagtatagtggcgtgcagttctgtgttgagcctctttcatgaatatactaggatgttggtttatttgcctaagggatgttcgttctctgcaattgtcccttgctttgtggtcacgagacaacatctgtctacagattttcagaatacattaactactagttattgagtgtttaatccacaccgtctatacggagtagctctttagatgtctcagggaaaaaagcccctataatgacgatgcggataatagtcgcctaacagccttgactattggtttgccttttcagcccaacgggtctgtttctccgcttgaatgacatctgacatctgggcagtagcccttggctgcagtaaatgtctcagaagatgcccagctgtcgctcttcataagaattatggatattgccaaagagcgcgttctgctaaatatgaggtagttaacggactatcgctcttactgcctgccgcttgctcctaggaatacgacttcagctctagcggtagacatccacaaaaatattctagacccatcgatcatgcctactggatgatctagcagcccataataaaatttgcaacccctcatttgcctaccatattctaactagcaatcagaaaatacctcattctagctaaagtctgataggacttcctaggagttctcagacatttcgtgccaccacaatgtgattggtgagatgatatagatcctaggagcttaagtgctggtacccactcgcaagagctatgagtgctaacgttgagagtcaaggtatataaaaaaacaaagagggaacccggttagtggttctaggatgcagttgataggattgtcgaaaaatcccaggccacagaggccaaagataagaccagcgaagatctcaagataggatcgtgttagtgatcccagccagcaggcgttgcttgcctgatccggacttgatgatgatgctattcccagatgacctaggagcagcgagatcgatgaaaattgatggaaattgatggagaaaccacagtaatgatgaaactgtgggtggtggcgatgatggatgatcttgaagatgcagatccaaagagaagaagaaaaggtgcagagtggaagcaaactccgcgggttagctattattaggaaatagcaaacaaccacaaaatcgtctgattatggtttaccccccagggtggtatcgcctggcagaaaaatctctgcggcaccttgacagatcgtcgagaagtgatctgaaactattcgcacatcccaaaggggaaattctcgagacttggcgagaagcgaattttccgaggatattgatagatcgtgagatcagaccaataacgaactccccgggctcataacctattaagatctacgagttagtagatgaagctacaatgtgtgttgtatgaagaagtgatggaggaaagggagagaactagtctaccccatggaagcatgtggaagcatgtgacaatgtgccgcgtgagagagttcaacaggcacgcgacactgggcccggatcggatgaggttccatggctcttacaataaggattgctagaaaaggcatagtagttttgattactatggttcgtcctaccctgtcctacctctatcaagtcccaggtctgaatttcttctttcctttctttccttttcacaaacatctctgcctttaacttactctcactcatctttcacctttactcatttctcaattctctagttatttacctctctattatctcaagtttgagccaatctgaggcaaggggacttcttactttttttcactttatactcaaatcgatttctacacatcctctattcggcactcggttaagtcacttgactatggaatcttctcagtctaaccctcctacctcgcccgactctgcaacttcacccggatccccaaaagctccatcgaaaattccaagaaggatcagctccaaaaggattgctcttcccgatttaaaatctgcactggaaagggcggttaaggccagagggaaaacatactcccaaattacggccttcgtttgttattgggacgacgacaacacttgtgctcaagaagatggagaaaccttttcccatatgatggctgatcttttcggagttaccagccaaacatttgtcataaaccacgaagatcccgttccaggctgggatttaggagatcgcctgtatcaagaagttgtgtccaaacaccgcatttgcaaaccaacgctcttcatttttttttacgctggccacggtacgatcaatcaacttaacgaactttcttttaccgcgaccaagaaggaacaatttgttccatggcgcaccatcgatcgtgaattgagttaccacacttatcctatggataccttctgcatcctagattgttgttattccggtactgctattgcgagtaacccgatgacaacccatgtcttagctgcttgtggctcttcggcatttgcgagatcccgtgtaaatggaatatcctttacacagcgagttgcgtggaccatgcgaaaactttctcactctggcaagatatctatctcgacagatgaaatttttgatacggtacagaatgaaactcctcgtggctgctacatgccaagattttcgagtcataatggggtgaatcccattgtcttacctttccacgtcacgtctacttcaactcctccttctccaggaagttcgtcttctggtcatacctcaagttcgaacctaggccctgcattacattcccgcccactatcacaatttccctccggccgcgaaactcacgtccttgttctactcgttctcgaaggaaacccgaagctggttgtccaagactttgaaaaagttgttgaaaacctgccggccaagttcaaagtgaaaatcacagatgcctatgaaaccaatgcatctgcgggagtctttgtgcgcatgacttgggaggcatatgcacgattctcgtcaagcgtagaactagacgcactacttcctgtgatcggaccatcactgattcgcacacatgagctccgcgagatttcggtccgagctggccgagaaaacattccattcagagatcggccccaggacaaggcataaactcccaatgatttcccttttttttcctttccatgtttgtacttttaattttttaattcctagcgccgaattgaagccgcttattctcaaactataagacacaacgatcatcaaggcagtgttttgcctctttataaaaagtagattggccgggagttccagagttacctaggtaccccacactttcttatcaagtctgccccgagataggattgggactagggattagtaagcttttttcaagcctgagcgctcactgagcaatatgtttttacattactagttaagcatatcctaagtgctcacagtgatcacccgtgctgtgaagtactcggtgagtaggagccctcataaaagcggcggcacccctatcgggaaattcgcgaccgtggcctaaaatccggtacaggacatatgtattgcatatgaggcttcataaatttacaagtctgcattctgaccaatatagaacgctgttctattggattctatgttgctaatttcacccgcatcctcattccatccactggcttggaggtgatctccagtgtctgaacttgttagtaacgcatatcacttctcaaggcctagacctgcaggtccgctgagtacttacattatacagctcggactcgacttcgtattgtccgttttctttttcaattggcgcacctgactcatccctcttggtggacccaagtcctactttctcccaattatatcgccgtgcggcacatgcgagaatcacaagtgcttcgatgttcgccagctcttgtccaatacagttgcggggaccacgctcaaaaggccgccaagcactggccggtatagagcctgtttccaaccagcgttggggaataaactcatcgcttttgtcaccgtacacggcatgatcacgctgtataagcttctggcagttgtatagcatcaacccatccagacacttatcttcaccattcggtaatcgaacgctcaatccagtgtttggggtggaaaatcgcgctgtcgcagctggtggatacagacgaagaatttccttgataacggcagaggtgtaggtcattctttggagagcattctctccgtgttctaggatttgatttcgaacgtaagtcgggtgcgaatcagaaccgaatatctcgtccagttctacacaaacacggcgcgaggcatgcggggttcgagctagctcgtagaatgtccattgtaataagatgcttgttgtatcatggccggcaaatagaaaagtcttgagttgatcgcaagtccggtctaacacttcgggcgttaactcgtgcgtttcgactagactgagagcaaggacactgcgagacggattttgtgaagttgactgcccctcaaacttttctttgatacgctctttgatctgcacaccaagttggcgagaaagcaacttcctctggagagggagtaataatttccatccgctgtggccggaacgataggttgagcctagtttgcggaagagtcgaacgattgcactttggttctcttctccgagttgagcgtccagatcaatatccatggtgacggcgccgataatgtcaaatgtcaaattcgtacatagttcatccagtaagaactcctcgtcagtggtcgcataatgatcgagcttcgtcaaaaaaagctgtgtcttgtccagaatacatggcagcagagtaacgaggtgcttatgggcaaatcccgggttgaactgtttgcgaaggcttttccactcttcgttctgactccaattagtatagtctagatgtacctcgaccttcaacctacttctgcaagaacaatcgacagtgggcccatcatgtcactataccagcgagatgtgtgtgactttggcggactgtatggaaacagcttggagcttttcgatatttgctctgcaacatcatgatcgcagatcacgcaaatgggatggctcactggtcgcaaatcgacaacaaatagcgccggcttgccgagagaatcatacatagctttgagagtttcgtctatcaattacagtcagttttatgttcctttcctaaatgggttttaaccgaccgatgtggatgtttggtcgatttgtcttcatgagtttgtcgagcgtggacaaatgcccccatagtagcgatggcggaagctggggcaaccaggcatattgttccgttcggtaatatgtaatttttctccagagatagaaaagaagaagtggaaggatcgtagcgactaaagtccaggccattgttgacatgaccgaataatcgtgatggaagcccgggcaagatccactcgcttgcattattattgtgctaaatatgcacttggatgacaaagattatgaagactaactcaacttactacaagagtagtcaacctttgtccttgacgataaaggatttatctgcttccagatgatatcacagatgttatatattttcccctatgttatggtatcattgaagatgaaaaacagtgtaagccccacggacgacttgtataagcaggcacatgtgcgaagcactcatagattcattcccttagttcctatttgctcgcgatacaatcaattactatacccttgcacatgcacaggacaaagtaaggggcattttaggcatctatcctgccgtattaggattagtattgttgagggcagaacagatataagaagatgcttttgcgacatgtagttgttgagaccgtttttgcctcaggttgattttgctgagcgaagctcagcaaactattaggacctacactttaccttgtttgatcttccttcttctctcttatactcagcaagcacacaatacaacccacctaggcatggtttcatttcccatcaatgattctcatttatctaactcgagttctcatttccatctttagatttctacattcgaacacatcgaaaatacgtcatccctcggtgcaaacaccaaagcctggagcatggcgaccataggcagcctttccgacatacgaaatgagatcttggggaatgacactgcgaaacgaatcgtgttcaaagtgagaactaagcatctggattctcaagactatcgcgcctcagccaacggagttatcagcgcggtttttcctggctgggaagatgacccgcgggttctgcctgtcgctgttgatgtatggcatagccgcacctacattgtcgtcgacattaaccatcttgactacgacttcaacacggcccacaaaatcaaaaaggtcttcccagtctacatactccgtcatgggaaaaagcgtggttggattcttatcagatggcctcgagaggatgagccccttggtgacaaagtcatgtatcggtacaacgtccatggttgggatgccgaaacgcctctcctagaagaccaccactcaattatcatgcatgccaatccccgcaaccttgatgagcaaccgttataaatgatgtgaagggctaccgagctctctgagttcacatgctcactgctctactgaatttcttggaggccaaatcttggagaaggatgacgagttctgtttcgtctgagaactcccgctggaaataccttgaagataatgggagtcaatatctatttctttccatatcattgttgtcttgatataccaaattatgtagtgtaatgagagaatcccaacatcatgtagctacccggtttcgattccctgaaagcgggatatataacatcaactcagactagggccatagtacggatccttcagtggaggtcgtctccaacgcttctatatcagcgatgatgatactgccgtttggggactagtgtaacagagccatatataacaagggatgggcttgcaacctgcattcatcattcacccacagccttttatccatctcgagttttctaccaaagatttctattttgaacacatccaaataccctcggtgcaaacaccaaatccgtggccatatggtgttcatagccagcatttccgatatacggaaagagatcttcgaaaatgacattacaagacgaattgtgatcagattgaggacccaaaatctggattctgaagattatcgcgtctcagcttagggatttgtcagcgatcctgcactgccctgtttattactctcgcaaaccttgtctcggacagcgctttatcaagcccatcacgggatatccattttcgtttgcgatttggtgagattgctcccagaatcggccgcaaactaaggatttcagccatttcgaagtcaaaaaagactttctggattgtagaactaattccgcggcattgggtccttatggacaacaaaaaggcggtatatctgtgagagcgactctttcatcttggctattaaggagtcttacctcatttccttgagtgccagatcgagaggctgcccacccggactcaacagtatcatatgcttgatatacgataccagcggtcgacgatttgcacctgagatgttgtgcagtagtgacagtgcggaggctggtgaagcgatgcacgcacgactggtgcaccatgcggcggatgagagttgatgaagtgaggaagttgaggacggaggagtattgatgaaagaaggaaaggcagaagggatgaaagaggagtaacaaatagggaggggttaaattgcctagaatcgatcggatcgaatcatgttagaccatgtgtctggaggggaaaagggccagaggattgtggacaaacctgggcgagagtcgacgttcgtgtccctccaatcgtgccttccgtatcctgtggtttgtccattatgaagttggtatttgggctagcctgtcgagctttgagtcgtgttggatatggtgtcgtgaagatattcagatcgttgaccttagaagtcaacctccgagcagcgctgatgtaaggataatgttgacgtcgacagatacatgtagttaggtaactaaactactgcagaatgctgcaagaggatgtcacttatctgataacgtattcttcgtaatttgcccaatattgactcaactcgcagaagaaagaacagatactctttgagaatctctctggtctctgtactgaacttactgagccggagttctatccaagccacccgcttagaaaggaaaaatgccagtattaagtatcaaagataatccaactaaccaattcgatcaatttgtctcattattgctatacaggaagtacagctacgataagagacagtctctgaaggtaagaatccaggaatagccctaggttatagaaagcttatcggaaaaaaagaaaagaaaaacaaagtccaagacgggtcttaaccacgaccgtaaggctatgttacccagtgatggtagcccctgatctacgtaaaagcaaatggggaatgatcttattccctaaaatgtacattggtaaggtgtagcctgtagggaatgcccgccccacacctactctagttgaagaccggtcaggactcagaccatgttcttttactattatacgatagccaagcatttggccagatgaagatagtttgtttaatttcctgcaaggtgtcattgtagctcacttatctgatacgagggtctgtcactattctgtagtgttccgagaacaccctggtgtatagacacaaaagcctgacgatgaccccacggcagcagttcttaatgattgcagcacggttaaaacttttcatttcctctcaccaatcatccgctcgagtcttgcagcaagcgacgctcatattccaagcgtattttgcgggccgacttgatcgtgtggcactcccgcagacacagatagaggtccagaaggtcgacggcagaggacgactttgaataaggatggctttgtaaggtgttccctgattaggaaaatgatccgcggattctgtttcttgctattgacgtatgggataaacgtgtcttcattgtcatcgacatcaatcattgctgtttccaaccggttcccttcagtccggatatcccgagacagatggaaacaggttgtctgcctgattatccaggcaccaaacagtcacctgagcgataagcatccagtttttttcgccgctttttttttatgttgtacatattcccccaccatcagggattagacacggcattttctttcgttctggtctccgttgacgctgtactttttaacattgaattccccaggtttcgtcactttggatctgtggtagcattccagggaccgcatccgattgacttgacgtctccgttcgcttgtccacccgtggttttaaggggtccaattaatttcccccacctctcccctgaaccatttcgactggacacttgtcggctagaatccgatttcgcaactggtcgcgtgcgccaaagataagccattgagcctccgtgtcttggcttacacgtgcacataccattctcaactcacaggtagggctcccgtcccctttctcgcacgttccgtgtgcgactctcgtgtagataaggaatcccaccgtatcgctctgtgttctttcaagtacaccttgcccccttttttgtaattcgactcgactctcgctccagcagcactcgaaccattggccttctttaatcctaaccatactaattcccaacagattcatctacggctcggatatcagtttgaccaaggcttgcacgcaagtggaaccgttgtcggctccccgccagacagaattgccccaaagcccattacgcaactattcaccatgccttctctggatgatctttcgactctcatacttcgcgaggaccaagaacaccccagatccgaggaagattcccagggtctattccagcaagtacacgaatggctgcaccatgagaaagccagacgacagaatcgtaaagcacgcaaagccgaagcaacctcccatgcgacaaacgagaacgagtcaaccgaagagaacgccgttttagaaagacctagctcgaacacctcgaacacctcgaacacctcggagaacaccttttccctggataaactggaaagaatcctcctccaatatgcgactgcccgacctagaagtgcactgggctcccacagacaacctgtcaaacggcagtctcggcatcgtcttagaggcctgagaagaggctcggcctccgagtctgaactcacagatgctgacggggccccgccaagcgtggaagcttccctggataatacaaagacgcttgcgtacaccggtggcactgcagtagaagagaacaccgactccagcgcgagtgtgaaacaaggaaaggatgccgaggcttgggtggttttcaagtccgagatcgtacgtcttgtacacactctgcagctgaagggctggcgcagggttcccgcggatttggcgtcagagattgaagtggtcaggctcagcggtgccctcacgaacgccgtgtatgtagttgcgccgcccaagaatctgcctccttcaaagaccgatagcaacagtctggtttcaaggaagcgcccaccgtaagcaacgaattccccccctcgcttggagacacatctaattggattacaggaagcttctcttgcgtatctacggtcctcaagtcgatcatctaatcgaccgagagaatgagctgcaaattcttcgtcgtctcggaaagaagaatattggcccacgcattctcggaaccttcactaatggccggttcgaagagtactttgaggctcgcccactcactcccaaggagctgcggatgcccgaaacggcaaggcaggttgccaagcggatgagagaattgcatgatggcgttgaacttcttgaagaagaacgcgaaggcggacctatgatcttcaagaactgggataaatgggtggaccgttgcgagcaagtgatgaactggctggataaagaaatcgaatcccctcaaaacgaggccaaagctgcatcggaaccatggcgtcgccgcggctatgtctgcggcgtaacgtgggacgtgttccgcagagccgtggataactaccgactttggctggttaacagctctggtggaatggccgagatcaagcgacagctagtgtttgcgcataatgatgtaagttcatctcttccaagtgcaccttcctgggaattttactgacttgtttagactcaatatggcaatctacttcgcatggagccggccacagagtcaccgctgcttttgcctgcaaatgaacataaacagctgatcgtcatcgactttgagtactcttcggccaatacacctggactcgagttcgccaaccactttgtaagtctaacccaactactaatccaaatggatgctaaccacaacagaccgagtggtgttacaattaccacgacgaagagcgctcatgggcttgcaacaaccgcaactacccaacgtcagaggagcagtaccatttcgtgtcgacctacctcacccaccgaccttccagttccggcgcacttatttcacctctatcctcgccgaccattcgcgctcgccctcctgttgcgctcgcaccgttggacttggacgagggttcggacagacccagctctcggctttcccaaaatgagcagtcgaaagaggctgaactcgacgccgaggtacgattcctcatgaagcagacccgaatgtggcgggcgatgaactccgcgcagtgggtagcttggggtatcgtccaggccaaggtgcctggcatggaagaaggtattgccgagatgcttgctgctcgcaacgggccaagcgacggcaatgacgatgacactaagacgccacctgcggtcgatatcgaagaagaagatgacggagactttgactacctggcttacgcacaggaccgagtcatgttcttctggggtgatctgctgtcactaaatctgatcaaaccagaggaactgcccgcgcctctactggagcacataaagtcgcggcttgtcacatactaggaggagaatatacgataatcttgacggagacttgttcatattatgaattacagagtggacgccagtacatagcactgcgtctatcggtgacttatcacacctacatgtatctactacacaatagcgttggggtttcaacatcatcatcgaataccatatcttgtcttatatcatttccaatcatctccagggtatctgaaatgccattgtagataagcagccaacatccaaccctacctccgcatctcaagcttcttccgcgtctccttcttcgcaccctcaacccactccccataagccttcccctccggatccttctccttaaccccgacaacccccttcaaaacctccccaataaacccaacaaaattacaccgtctgagcgtattctcccactgccatgccgccctcttcctctcctccctctccagcgtctccacatccccaatgtccctcgccctcccacgcggatcccgcacaacagccataagattaaaatgtgtttcgtcaggcgggtagcgcgcaatccgcctctgcagaacctcaataaccctctcgggaaactcagccgcgccgcacggaccatggctaataggatgcggctgcagcccatccaactcatacaacgtcccattaaccggtgtatacgcaatgaagtgataaacgtccgcacccttctcgtcgtcctgcggacgcgccgtctcgtcggcgaacgggctcgcgcgcgcaaagctattgtgcgcgctgcggatggcttccgagtttgacagcgcctcgccgcgcagctcgggcgggaaccccgttgtgaagtctttgaaggagcgcagctcgttgccgagctcgattgctggctgtggcgatgctgggtcgtcgtggttgaggattacggagaggatcgcttgcgtgccgcaggcgttttggatcgtctgcgccgcgaagaagagcttgtctgttgcggcagggtcgtaggttccgtctaggggggcttcggcgcgtgcgccggcggcttcacgcgtccatttgaagaggaagattacgccgtagactgtgctgtttggggttagctttgtggactggttttggttgtggagtattttattgaaattgcggggcttgggaggtttgggaggtttgtgttgcttaccctagtgcccgtatcgtgtctgcgtctagagatatgagctcttcgaattgcgtgtcttttactccaagtgtttcgatcagagaggtgaagagaccctagcttgggttactatgctgctttggatggatcgtggggttgatggtacctcgtctgactcgatggtgctccagccacctacatcagccattttgactgtctgtgatggatgctaaggatgattgaatggaagatgttgtgttgtcgatatgagcgcttgaagttgctttcttccctaaatgggaatgcggttatgtcattgtcacgtgaagactgattgtgatagctcgaagtcacgtgcgtctccaccatatcacaacgatatccacagacacgttattttacagatcgagagggccatatggcagtgataattgacttttatttctgtgccttcaagggagatctactcacaaacaaacggggcctactgccggagtgtgccagcactgcggaattcgagaatgatgatttcggcgtggaaatgctacggagagaacttgacctaaagcaaaatcacatagtgcttggtcaaatggtgaatgggtagtcactctattgacgaaaccgtagacaccgagaagcaataggatgattgagccatgaaaatcccccatgtccctgcattctgttcccctagccgcgttggatcgcggagaaaagctccctcatgtttgcaagcatccctaggatgtcgtcgaattgctttccacgctgttcgggagctgtcgttggggtcagcgcccgagctgggacgatcagctcggtatagttgtctgcgcaatgaaagaatggttagagaagttagcgtccatctcagaattgagaggcctgctattacagcatgagactgaaatggactatgacgcttttgatctttctctcaagatctagagagtgagtttgaagatagcgctatcaagagaatgataaaggtgatcatctatcattcgggagtcctcgatgacagggcacaagctgattctagcaaggctcattcttgactatccccagggcggcttctaccaagtataggcttcctgtcaccaagatctgtcctcctataccaatcatcttggcatgatcaatgccatttctgacattatgtgccatataaatggtctttgtaggccaatgctccctccagaactgggcatattcttccggccatccactcggagtggcaaaatgatcgtcatattcaatcttttcgacgaatataacatgctgaatttgcatttgtagagagttccctaacgtttttagtatatctttccagtcacgcgttcgcttcggcgaaaaatgagcaaagataagaactcggacagagctgctagtccaggccattgttagattactcactggtaattccaaagggaacttacctcgtactggccacccggttataccattttgcgactactgccatacttgtctcgttgtgtgctccgtctaaataccacgtgcagccactgtaatcgataatgtcgaagcgtcctggccagcggcacttctcaataccagctaggacatcctgtccatcgagcgagtgatcacataggtagagaaacctatgagcaatttgtatagccagcgcgcagttttctagctgttcaagtggcaggtcttcaatgtgaacgtctttaacgaattcaagcaacgtccccttaacatctctgatgaattggagtgatgagcccatttctaaagcccggcgctcaatctcgctttctacctcttgatcctgcgaaactgagagtgaaagaaccccctttttaaagattccacttttatgccatgcaatatgcttcaaggtccttcctaggttttcaacgtggtccatgccaatcttcgttatggcagtgatggcaggacgatcaacgaaatttgttgcgtcgaactgaccaccatggtgggtctcgcagataacaacgtcgacgccttcttcaatgaacgtgtggaacgccaagatggccaacatctggagaaacccaggggtcttggtatcggttggcaacgcgtcagagttgagagacaggcccctgtatacttcaaagaaacgcctggcgaagagatccactggtaatggattcgaatcaattcggattctattccgaggccacagactaggcgatgtgtacagaccgatcttccgcgtaagtccatttcttttcgcatgctcacgcaagaagcagtccacataggcgcatgtgctacctttgccttttgtgccggcgacatgaatgacattcaagcgattaatattttcggactagtatccgttagtgaattccaagtgacgaaaatatcgcacatacatcatgcccaagggttagtagccagtctctcataccaaggagaggttctgaccctttcaaggtagaagcatttggggcctttgggacacttggcgacgacgatagcgtcgccgacgaatcggggaatggccgccggcactgttgaagcaatccgattgctttctaggctcgttagaactggtatcacccacgataaataagcctacttggtatgccatgtttgacgtgggtctgcctttgttctgttgagatgtgacccttgcagtcctcgggatttgctgagacagctaaagtggttcctaaggcaacaactggagctggataatttcataagcggaggtcctggcattaggtatgtgattatggcagtagtcaactatatacggagtaactagttaactacttggtgtttaaacacccaatggtcgagtgttggttgcggaatgagatcacatgacctagaattgtcgagaaattggcaggaacggatgatcctttatccgtaggcatggctgcccaacgcgaaaccctataacagacatgaaaactctcataacggctgtcaactctattacctttccgacctgagatgatcttctcggacctccggggtcttgattgattttgtagtacgtattaccatcgtgataccgttgtcaacaagcggcccttcctcaaacatatacacaagtatatacacgagttgatgggagacaatgcgttgataggggtagggagtaaacagtacccaggtttctattaggcaggccgggaaacaaagtgtgtccgcttaaaatgtaggctgtagactgtgttgggattctaccgtgtccgccacgaattcaatagtgtatgtggtgagccgtgtggcctgtcagatctttggatcaccagatggagatttagcctccggaatctagactctggatacatcgcccaaagtctgtatcaaaatcccgctttgaccgccataaaaaagcaaatccatctggccggcctcacgcagataacaacaaccacgcagcggcaagccctgagtctggagaaccatagctaattacgatagctgcggtaacatgcaggacattagtacaatccagggatattgatcgtgcgtactaatagcagcctctttgccgcggacattccattaccgtgttgtgctgcgtctgcgaattctacaaaatccagagttacctatcgccatcaacaaggcagttcacattgggttcagattccatgagctttctcgtcaaattctttgagtgtctccttcttaccaagtctatattctcgacctgctatcgcaatacctccatcgagtctttcttggggagtgagaacgtcacaccggggcaggagatagccgcggaggtagacactttcgaacgatccacataccctcgatcactggcatacaatacaccttcgaccattaagattcaacccgttctaagtggccggtcttatccttcacctcggagttctacagcttgatatcttctcctgaaggaaccgccagcgaatataactggacatcatggcttccctttctttacaagggtatgtttccacccttggtcacgattcactgtcaatgcttatagctaagtgggcagattgatggatactaccaacgcagacacaagacctacgaatccgccccgtatcataatcctaatggagtacagagggatgttagagtgttaccccgtggctcaaactttcctacttttttatgctaagatggatgatggaacttgcaagactgtgcgtattggactatgtcggatattggaaggagacagatcgtcgtgcttgctggaccgaaatataagccgccaagcgaaacacatattgccgtctgaggagtggagtttcttggaagatcgatgtacgaggaagcgacagcggctgtaagctggtcatccgaagaatataatacccaagagatttgagttttcgtaaagaaatcgaagacaagcttaaataaactatcaacttgagatggtagaaggtgggtgacgtcgatttcagcgtctacaaaaaggcgcgatttgctcatacgtttcatcgatggcattggaccctcataattcgggttcgttgtgatatatgcttacctactccgaagagatgactagaactgggtgtcggtcgccattttagaggaacagaatcataacagtacagatgaccctatcatgctgccgagcctccatcttcaagcttaaccacggcaacgtccgtgtgtgtgagttccatgattggtttgtcaattaccctgccaggcagggaacctgtgagcagtaacagtcataaatttggagcccaaagcattttgaacaaggacacctgaggataaacgcattaactctgctttgagatttataccagagcttaaagggaagagcaaagagcatcacaatttcattaagtaatgttgaatgacctgctaatgtttgtcctgtttgataggcttcattcaactaaatcacactctcctctcttacttctcacagcaccatcacttggctggtcacagcaatacctctctgctatgatccacggccacaccggcactacactgtttgactagtgctaccgcgactgcctttaaaatcaatctcagctatgccactgctacattctagattcctagtcatattgagcaacgacagtaccgtctcttgaatcatccccagcctcttcactgcttcataccctcccacgctatatcaaccacactctcgccacactactaccagctcttctgccgcactcgatcaactacattatcgccaggatgggccggagtacccgagggtgcggagagtgcggagggtgccgccagcaaaaatatcattgccctagagattgtggctaaagagctcttcttccagctcaaagcctcagtgaggatgttcgtgggcaaccgaatcgaccgacatgcgctcgagaaaacaaccgacaaactagaggacaagagcaaacaagacaagagcgtccggatttcagaaatgagcttggaggacgtggaacagtgcctaggcatgatatggagatgaaggacgtgcagtcgctagagtctagaggtggctcaggtgacgcagatcagacgccgaagaaaagaatcgaaataatgaagcaaatatgctctatctacgtcaaccctcgtctcgagctaggagcgacaaatacacccgggaatcaagtgaaaaagaaatgaagtgagagtgagagcgaaatgagagtggactcttttttgggtcgattttatgttgttatttttttctcactctctcttttttcttgtgagtccagagaaagattgcctcaaaaaatggttggggttcacattggccagtcaactcaatctctacctcgagtggcccagaaaattttctcaagagagggaaatatggcgctagtcctacggttgaagggaacggtataaccctaccattcattctacgacatcttactagacacactaggacaaggcggagcggatttcgtgttgacatcccagatgctattgcatgatttggcggaacgtgtctggattacacttgataaggccaagaaggtcaaggtcccgaaggaaaatgcccatcaacgttaaaaaaatgggcgtctgtgccaacgatggcatattgtctatgaaattgtggtgcttttctctgtcggtcacatggaatgggataaggagcaaacgcatatgatcacaatctggcagcttcgagccagtcatctagtggtcatgtttcatacattcctgtgatgactgctgataccactccctcgtctatccgattgacgcgatcctcagacgcctcatcgcccaagccgtgctagccatccctgacaaccttaggttgccgagggtccgcgactgcgaaagctattcaaacgacaggaccgtcttatttggtgtggtcgatgccggagagtgatagagctcagcaatccctgtacgaaaagtacgaaaacggacagctatcatatttgggcccagcgaggaagaagaagcagaccgaaagaaacgaatcacacaaaagacatcgagccaggttattaagaagtctctggtttcacgagttgcaagttctacccatcccattgtgttatttctctggacatcttttctttgatcaccaaatatctccaacaagaatggcccacgacaaaatacacagatatcattgaccctggagctatacacgaccatttttatcctcggcgccaggtcaatggcatatgggagataaattattctccttattactttgtacgcattcttagatcacagtctctgtgacgatctaagaacatgcaatccaaacgcacttccgatgtctgtaccttccactcgtcgaggaagtcgcgccttcctcgaacgtaaatgagaagtatcatttgcatagtttgcaggcagagcaaatagttttcctttctctccttgtacttagtatttggtcgaaaatgcactcattctctgaactgatctagcacgtaacattctcgttctctagtccgacctctccaagctctacaacttcaccaactcaaaatatctcccccctagctccattgactctaattgcgtcccctgttccacaatgttaccttcatgcaacactataagcgtaagttagtctctgcattgtaaacagaatcgatatttgtttcttaccgtaaatacaatcggccttctgtaccgtgcttatccgatgcgcaacggcgaccgtcgttcggccttgagccgccgcattcagtgcatcctggacgaccttttcagactccgaatcgagcgcggaagtcgcctcatctaggaggaggatacgtggatcacgaagaagcgctcgcgcaatggctatttgttgttgctgtccgccagagagcatgccgcccctcgctcctatcaccgtcgagaagccgtcactgagctgggcgttagtagatatttactttaggtcagaaatagaaaagcagagccggagggtgcaagggaaaggggtggcttacggtagagatgagatgaagtcgtagatattggcatccttgcatgctttgatgattttctcctcggaaccatcctcgtcgttggttcccagggtgatattctccctaatggttccttggtatagcgtcggctcttgaataaccagagcaaggtggctcctgtagctcttgagattcaatctagaaatgtctttcccatcaaccaatgtttgacccgcttcaggatcaaagaaccgctccagcaaagcaatgatggtgctcttcccacatccactcgctcccactagacctgtgtattggcccggttgaatactcaagctcaagccgctaataaccaccctctccggtctgttggggtatcggaaataaatatttcgcaactccaagctgccttccatattcgttaacagctcgccggtttcctggcgggcgtcaatattgacaggccggtccaataacgttttaatatcctgggccccctggcgagacttgctcatatcaggcgcgaaggagaaaatagccccggcgctgaatgcgcctacgacgatagccgcataagcgatgaagaactgcaccatagaatagccttcatggattatgagacttcctccataccagaaagccagcgcgatacatagaaaattggccgactgtgaggctgcatagagcgctgatgacttgagtgttgaaaccaccgatttctgtcgctgagcttccaatatgttgtgatactctcgctgtgcatggctttcaagatttagcgatgcaaccgtcttgatggcagaacttgcctcacatgcataagttcctgaagctgtatatgccgccttcgactatcgagccatttccccgaggatcttgagtcggacgagaccacaagtaagaacaactggaatggttgcggtacaaaccagtcccagcttccaacctatcgcaatcgatacagccacgccagcaatcaaagtcgttgagacaatgaagatggagcctaaaatcacaccactcattccggcaaggttggtagcatccgtggacaacgaggatgtaagtgaaccggctgagaacttggctttgtcgaacatggaaatatcctgatagagcactcggagcagtaggcaaaacagagacccgatgctccccagcccaagaatgcagtacagcccagcatcagatacatcacactccagaagttgacattatgacgtagcttttcatgcatatcaggcggcaacgacattgccgcgattttcttgccgtagaacacggcctgtctacggaatggtcagtatcgatattctgcacagcgtgggaatagagtctagcgtgggatttccagcgcctgtgatgattgaaaataacagaccccagaccatggttagcgtttcttccttgttgaagttggcgacaaacttgatcagctcccataaggagtatttgtagtcggtctcttgctcggaatctctcccgcggtcttcggttccccgggtgctgctctacctcgtacgtatatattttagactctttgccctcgtcttttaggtcagaagctcagggtctgcttcgagggcagactttgcgtcgctgattacgatactcctttcggtcgacatgcgctgcttctccactaactcgtaatacatcgatcgtttctcaagtaggtcgttgtgggttcctggctcgacaacacgtccgtgagacataacaacaatattttctgcctcagtgatagtagataatctgaataatagtcaatttctgtctctaacactaatcgaacacataccggtgactgattgtgattgttgtccggccttccgcagcaacatcaagcgccgcctgtaccaaccgctcggcctgggcatctagagctgaagtagcctcatccagtagcaagacctttggattgctgataatagcccgtgcaatggccactcgctgtttttgtccacctgaaagtaatgagcctctttcgccaacatcagtatcgaatccatccggcaaggcggagataaattcaaaacagttcgctttctttgcggggtcaaacacaagcttttctattacagcgtgaagggagttttcgtgtccagtacctatcagaccaaacctgatattttcgaatactgtcgtggcaaagagagtgagctgttgcgtaacgatcgcgacttgttggcgtaaccattgtaaatttagagacgtgatatcgtggccatcgagcactatggtgatctcattagcacggttcattcttcacaagaaaaagcctcacatatctcgccacttattggttcataaaacctctcaatcagacccgccaatgtacttttcccacagccagaagcaccaacgatggcggtcgtctttccagctgtgttaggactagctaccagcgtatcctgaaaatggaggtt
